(19) United States
(12) Patent Application Publication
(10) Pub. No.: US 2012/0180165 A1
(43) Pub. Date: Jul. 12, 2012

(54) Plants Having Enhanced Yield-Related Traits and a Method for Making the Same

(75) Inventors: Yves Hatzfeld, Lille (FR); Christophe Reuzeau, Tocan Saint Apre (FR); Valerie Frankard, Waterloo (BE); Marieke Louwers, Gent (BE)

(73) Assignee: BASF PLANT SCIENCE COMPANY GMBH, Ludwigshafen (DE)

(21) Appl. No.: 13/497,854

(22) PCT Filed: Sep. 22, 2010
(86) PCT No.: PCT/EP10/63931

§ 371 Date: Mar. 23, 2012

Related U.S. Application Data
(60) Provisional application No. 61/249,290, filed on Oct. 7, 2009.
(60) Provisional application No. 61/252,208, filed on Oct. 16, 2009.
(60) Provisional application No. 61/249,282, filed on Oct. 7, 2009.
(60) Provisional application No. 61/252,236, filed on Oct. 16, 2009.
(60) Provisional application No. 61/252,183, filed on Oct. 16, 2009.

(30) Foreign Application Priority Data
Sep. 25, 2009 (EP) 09171331.3
Sep. 25, 2009 (EP) 09171353.7
Oct. 9, 2009 (EP) 09172707.3
Oct. 9, 2009 (EP) 09172713.1
Oct. 16, 2009 (EP) 09173350.1

(51) Int. Cl. A01H 5/00; A01H 5/10; C07K 14/415; A01H 5/04; C12N 15/29; C12N 15/82; A01H 5/06

(52) U.S. Cl. 800/290; 800/298; 435/320.1; 800/320; 800/320.1; 800/320.3; 800/320.2; 536/23.6; 530/370

(57) ABSTRACT

The present invention relates generally to the field of molecular biology and concerns a method for improving various plant growth characteristics by modulating expression in a plant of a nucleic acid encoding a GDH (Glutamate DeHydrogenase) polypeptide. The present invention also concerns plants having modulated expression of a nucleic acid encoding a GDH polypeptide, which plants have improved growth characteristics relative to corresponding wild type plants or other control plants. The invention also provides constructs useful in the methods of the invention. The present invention relates generally to the field of molecular biology and concerns a method for enhancing various economically important yield-related traits in plants. More specifically, the present invention concerns a method for enhancing yield-related traits in plants by modulating expression in a plant of a nucleic acid encoding a FLA-like (Fasciclin-like) polypeptide. The present invention also concerns plants having modulated expression of a nucleic acid encoding a FLA-like polypeptide, which plants have enhanced yield-related traits relative to control plants. The invention also provides constructs comprising FLA-like-encoding nucleic acids, useful in performing the methods of the invention. The present invention relates generally to the field of molecular biology and concerns a method for enhancing yield-related traits in plants by modulating expression in a plant of a nucleic acid encoding a SAUR polypeptide. The present invention also concerns plants having modulated expression of a nucleic acid encoding a SAUR polypeptide, which plants have enhanced yield-related traits relative to corresponding wild type plants or other control plants. The invention also provides constructs useful in the methods of the invention. Furthermore, the present invention also relates to a SAUR-based protein complex. It further relates to the use of the complex to enhance yield-related traits, and to a method for stimulating the complex formation, by overexpressing at least two members of the complex. The present invention relates generally to the field of molecular biology and concerns a method for enhancing yield traits in plants by modulating expression in a plant of a nucleic acid encoding a dehydroascorbate reductase (DHAR) polypeptide. The present invention also concerns plants having modulated expression of a nucleic acid encoding a DHAR polypeptide, which plants have enhancing yield traits relative to corresponding wild type plants or other control plants. The invention also provides constructs useful in the methods of the invention.

[0001] The present invention relates generally to the field of molecular biology and concerns a method for improving various plant growth characteristics by modulating expression in a plant of a nucleic acid encoding a GDH (Glutamate DeHydrogenase) polypeptide. The present invention also concerns plants having modulated expression of a nucleic acid encoding a GDH polypeptide, which plants have improved growth characteristics relative to corresponding wild type plants or other control plants. The invention also provides constructs useful in the methods of the invention.

[0002] The present invention relates generally to the field of molecular biology and concerns a method for enhancing various economically important yield-related traits in plants. More specifically, the present invention concerns a method for enhancing yield-related traits in plants by modulating expression in a plant of a nucleic acid encoding a FLA-like (Fasciclin-like) polypeptide. The present invention also concerns plants having modulated expression of a nucleic acid encoding a FLA-like polypeptide, which plants have enhanced yield-related traits relative to control plants. The invention also provides constructs comprising FLA-like-encoding nucleic acids, useful in performing the methods of the invention.

[0003] The present invention relates generally to the field of molecular biology and concerns a method for enhancing yield-related traits in plants by modulating expression in a plant of a nucleic acid encoding a SAUR polypeptide. The present invention also concerns plants having modulated expression of a nucleic acid encoding a SAUR polypeptide, which plants have enhanced yield-related traits relative to corresponding wild type plants or other control plants. The invention also provides constructs useful in the methods of the invention. Furthermore, the present invention also relates to a SAUR-based protein complex. It further relates to the use of the complex to enhance yield-related traits, and to a method for stimulating the complex formation, by overexpressing at least two members of the complex.

[0004] The present invention relates generally to the field of molecular biology and concerns a method for enhancing yield traits in plants by modulating expression in a plant of a nucleic acid encoding a dehydroascorbate reductase (DHAR) polypeptide. The present invention also concerns plants having modulated expression of a nucleic acid encoding a DHAR polypeptide, which plants have enhancing yield traits relative to corresponding wild type plants or other control plants. The invention also provides constructs useful in the methods of the invention.

[0005] The ever-increasing world population and the dwindling supply of arable land available for agriculture fuels research towards increasing the efficiency of agriculture. Conventional means for crop and horticultural improvements utilise selective breeding techniques to identify plants having desirable characteristics. However, such selective breeding techniques have several drawbacks, namely that these techniques are typically labour intensive and result in plants that often contain heterogeneous genetic components that may not always result in the desirable trait being passed on from parent plants. Advances in molecular biology have allowed mankind to modify the germplasm of animals and plants. Genetic engineering of plants entails the isolation and manipulation of genetic material (typically in the form of DNA or RNA) and the subsequent introduction of that genetic material into a plant. Such technology has the capacity to deliver crops or plants having various improved economic, agronomic or horticultural traits.

[0006] A trait of particular economic interest is increased yield. Yield is normally defined as the measurable produce of economic value from a crop. This may be defined in terms of quantity and/or quality. Yield is directly dependent on several factors, for example, the number and size of the organs, plant architecture (for example, the number of branches), seed production, leaf senescence and more. Root development, nutrient uptake, stress tolerance and early vigour may also be important factors in determining yield. Optimizing the abovementioned factors may therefore contribute to increasing crop yield.

[0007] Seed yield is a particularly important trait, since the seeds of many plants are important for human and animal nutrition. Crops such as corn, rice, wheat, canola and soybean account for over half the total human caloric intake, whether through direct consumption of the seeds themselves or through consumption of meat products raised on processed seeds. They are also a source of sugars, oils and many kinds of metabolites used in industrial processes. Seeds contain an embryo (the source of new shoots and roots) and an endosperm (the source of nutrients for embryo growth during germination and during early growth of seedlings). The development of a seed involves many genes, and requires the transfer of metabolites from the roots, leaves and stems into the growing seed. The endosperm, in particular, assimilates the metabolic precursors of carbohydrates, oils and proteins and synthesizes them into storage macromolecules to fill out the grain.

[0008] Another important trait for many crops is early vigour. Improving early vigour is an important objective of modern rice breeding programs in both temperate and tropical rice cultivars. Long roots are important for proper soil anchorage in water-seeded rice. Where rice is sown directly into flooded fields, and where plants must emerge rapidly through water, longer shoots are associated with vigour. Where drill-seeding is practiced, longer mesocotyls and coleoptiles are important for good seedling emergence. The ability to engineer early vigour into plants would be of great importance in agriculture. For example, poor early vigour has been a limitation to the introduction of maize (Zea mays L.) hybrids based on Corn Belt germplasm in the European Atlantic.

[0009] A further important trait is that of improved abiotic stress tolerance. Abiotic stress is a primary cause of crop loss worldwide, reducing average yields for most major crop plants by more than 50% (Wang et al., Planta (2003) 218: 1-14). Abiotic stresses may be caused by drought, salinity, extremes of temperature, chemical toxicity and oxidative stress. The ability to improve plant tolerance to abiotic stress would be of great economic advantage to farmers worldwide and would allow for the cultivation of crops during adverse conditions and in territories where cultivation of crops may not otherwise be possible.

[0010] Crop yield may therefore be increased by optimising one of the above-mentioned factors.

[0011] Depending on the end use, the modification of certain yield traits may be favoured over others. For example for applications such as forage or wood production, or bio-fuel resource, an increase in the vegetative parts of a plant may be desirable, and for applications such as flour, starch or oil production, an increase in seed parameters may be particularly desirable. Even amongst the seed parameters, some may be favoured over others, depending on the application. Various mechanisms may contribute to increasing seed yield, whether that is in the form of increased seed size or increased seed number.

[0012] One approach to increasing yield (seed yield and/or biomass) in plants may be through modification of the inherent growth mechanisms of a plant, such as the cell cycle or various signalling pathways involved in plant growth or in defence mechanisms.

[0013] It has now been found that various growth characteristics may be improved in plants by modulating expression in a plant of a nucleic acid encoding a GDH (Glutamate dehydrogenase) in a plant.

[0014] It has also now been found that various yield-related traits may be improved (herein also refer to as enhanced) in plants by modulating expression in a plant of a nucleic acid encoding a FLA-like polypeptide in a plant.

[0015] It has also now been found that various yield-related traits may be improved in plants by modulating expression in a plant of a nucleic acid encoding a SAUR polypeptide in a plant or modulating expression in a plant of a SAUR-based protein complex.

[0016] It has also now been found that various yield related traits may be improved in plants by modulating expression in a plant of a nucleic acid encoding a DHAR polypeptide in a plant.

### BACKGROUND

### 1. Glutamate Dehydrogenase (GDH) Polypeptides

[0017] Glutamate dehydrogenase catalyses the reversible deamination of glutamate into 2-oxoglutarate. It exists at least in 3 forms, depending on the coenzyme used: NAD (EC1.4.1.2), NAD(P) (EC1.4.1.3) or NADP (EC1.4.1.4). In plants, existence of only the NAD-GDH form has been reported, although there are indications of the occurrence of an NADP-GDH form. Plant GDH exists as hexamers of alpha and beta subunits in 7 isoforms, going from isoform 1 (6× betasubunit) to isoform 7 (6× alpha subunit) (Turano et al., Plant Physiol. 113, 1329-1341, 1997). Alpha and beta subunits are related to each other on amino acid sequence level and usually have a sequence identity between 75 and 85%. GDH isoform 7 has a high glutamate deaminating activity, with a minor aminating activity, whereas GDH isoform 1 has only a deaminating activity (Turano et al., 1997). Glutamate dehydrogenase activity in vivo is primarily located in mitochondria; the reaction goes mainly in the direction of Glutamate deamination and 2-oxoglutarate production, rather than in the direction of Glutamate synthesis:

L-Glutamate+H₂O+NAD+⇄2-oxoglutarate+NH₃+NADH+H⁺

[0018] Downregulation or overexpression of the beta subunit in tobacco (transgenic lines having GDH activity ranging between 0.5 to 34 times of normal activity levels) had little effect on leaf ammonium or the leaf free amino acid pool, except for a large decrease of Asp in leaves; furthermore, plant growth and development was not affected (Purnell et al., Planta 222, 167-180, 2005). No plant phenotype was described for plants overexpressing the alpha subunit (Skopelitis et al., Plant Physiol. 145, 1726-1734, 2007). On the other hand, strong overexpression of gdhA from Escherichia coli (encoding an NADPH-GDH) resulted in increased biomass, as well as in altered metabolite levels (Ameziane et al., Plant and Soil 221, 47-57, 2000). Also other studies reported changes in metabolite levels upon overexpression of gdhA from Escherichia coli in corn (Guthrie et al., J. Anim. Sci. 82, 1693-1698, 2004), or upon overexpressing NADP-dependent glutamate dehydrogenase (gdhA) from Aspergillus nidulans (Kisaka and Kida, Plant Science 164, 35-42, 2003).

### 2. Fasciclin-Like AGP (FLA) Polypeptides

[0019] Cell-to-cell interactions and communication provide key structural, positional, and environment signals during plant development. In plant cells, such signals must traverse the cell wall that surrounds the plasma membrane. Plant cell walls are primarily composed of the polysaccharides cellulose, crosslinking glycans, pectins, and some proteins) that together form a complex interactive network known as the extracellular matrix (ECM). The nature of the interactions changes during development and is influenced by biotic and abiotic stresses, resulting in altered wall composition and structure. Cell wall proteins, which generally comprise less than 10% of the dry weight of the primary wall, are recognized as critical components in maintaining the physical and biological functions of the plant ECM. Most ECM proteins belong to large families that include enzymes such as the hydrolases, proteases, glycosidases, peroxidases, and esterases, expansins, wall-associated kinases, and hydroxyproline (Hyp)-rich glycoproteins (Arabidopsis Genome Initiative [AGI], 2000). Arabinogalactan proteins (AGPs) are a class of Hyp-rich glycoproteins that are highly glycosylated and are abundant in the plant cell wall and plasmamembrane. Type II arabinogalactan (AG) polysaccharide chains predominate and are O-glycosidically linked to Hyp residues in the protein backbone, resulting in the total mass of the molecule consisting of 90% to 99% carbohydrate. There is increasing evidence that Hyp (arabino) galactosylation depends on the clustered, noncontiguous arrangement of the Hyp residues. In contrast, blocks of contiguous Hyp residues, such as those that occur in extensins, are arabinosylated with short oligosaccharides. In Arabidopsis, the glycosylphosphatidylinositol (GPI)-anchored AGPs can be divided into four subclasses, the classical AGPs, those with Lys-rich domains, and AG peptides with short protein backbones. The fasciclin-like AGPs (FLAs) constitute a fourth distinct subclass of AGPs. Proteins with variable numbers of fasciclin domains, generally one to four, were first identified in fruitfly (Drosophila melanogaster) and have since been identified in proteins from animals, yeast, bacteria, algae, lichens, and higher plants Johnson et al., 2003 Plant physiology 133, 1911-1925). Fasciclin domains are 110 to 150 amino acids long and have low sequence similarity. This low sequence similarity may account for the lack of a single consensus sequence for fasciclin domains. However, all fasciclin domains contain two highly conserved regions (H1 and H2) of approximately 10 amino acids each. Proteins containing fasciclin domains, from a broad spectrum of organisms, have been shown to function as adhesion molecules. Fasciclin 1 (Fas1) from fruitfly is capable of promoting cell adhesion through homophilic interactions. A multiple sequence alignment of all the fasciclin domains of FLAs from Arabidopsis and a consensus sequence (smart00554) identified the conserved regions common to all fasciclin domains, called H1 and H2 (Johnson et al., 2003). Most of the Arabidopsis FLAs contain other conserved residues such as Leu and Ile near the H1 domain that are thought to be involved in either maintaining the structure of the fasciclin domain and/or cell adhesion (Johnson et al., 2003).

[0020] A number of mutations in Arabidopsis FLAs have been characterized. The haploin sufficient mutant, rat1 (resistant to Agrobacterium transformation), is resistant to transient and stable transformation of root segments by tumorigenic and non-tumorigenic Agrobacterium strains. This mutant has a T-DNA insertion upstream of the start codon of AGP17. A root-specific non-classical (chimeric) AGP from Arabidopsis, AtAGP30, has been implicated in root regeneration and seed germination. The other AGP mutant, sos5/fla4, displays a salt overly sensitive phenotype with increased cell expansion under high salt conditions (Gaspar et al; 2004; Shi 2003 Plant Cell. 2003 January; 15(1):19-32.).

### 3. Small Auxin-Up RNA (SAUR) Polypeptides

[0021] The early auxin-responsive genes, which are specifically induced within minutes of auxin application, have been broadly grouped into three major classes: auxin/indoleacetic acid (Aux/IAA), GH3, and small auxin-up RNA (SAUR) gene families. SAURs can be induced by cycloheximide, a translational inhibitor, indicating that their transcription is regulated by a short-lived repressor. Following the initial identification of SAUR genes from Soybean, members of this class have been isolated from mung bean, pea, Arabidopsis, tobacco, and, more recently, maize. SAURs are represented as a large multigene family in the Arabidopsis genome comprising more than 70 members. The SAURs encode highly unstable mRNAs with a very high turnover that are induced within minutes by auxin application. The instability of SAUR mRNAs has been attributed due to the presence of a conserved downstream (DST) element in their 3′-untranslated regions. There is evidence that the SAURs are regulated at the posttranscriptional and posttranslational levels, too. Recently, the calcium-dependent in vitro binding of SAUR proteins with calmodulin has been demonstrated which provides a link between the Ca2+/calmodulin second messenger system and auxin signaling (Jain et al. 2006 Genomics 88, 360-371; Hagen and Guilfoyle Plant Molecular Biology 49: 373-385, 2002). The phylogenetic analysis of SAURs from rice and Arabidopsis was performed to understand the possible mechanisms of gene family expansion. Recently Kant et al. Plant Physiol. 2009 online publication characterized the role of the rice SAUR 39 protein in SAUR39 as a negative regulator of auxin synthesis and transport in rice.

### 4. Dehydroascorbate Reductase (DHAR) Polypeptides

[0022] The role of dehydroascorbate reductase (DHAR) is widely related to ascorbate-glutathione cycle and to regeneration of ascorbic acid (ASC) from oxidized ascorbate. This enzyme is critical for maintaining proper redox state of ascorbic acid, and therefore of the cell, and has an important role in defensive processes against oxidative damage generated by drought stress (Secenji, M. et al. 2008—Transcriptional changes in ascorbate-glutathione cycle under drought conditions. Acta Biologica Szegediensis, 52(1):93-94).

[0023] U.S. Pat. No. 6,903,246 discloses DAHR genes from Triticum aestivum and their use to modulate ascorbic acid levels in plants. Lee, Y. P. et al. (Enhanced tolerance to oxidative stress in transgenic tobacco plants expressing three antioxidant enzymes in chloroplasts. Plant Cell Rep. 26: 591-8, 2007) discloses the role of simultaneous expression of DHAR, SOD and APX in chloroplast of tobacco, which increases tolerance to oxidative stress. The association of DAHR and plant response to stress was also disclosed by Ushimaru, T. et al. (Transgenic Arabidopsis plants expressing the rice dehydroascorbate reductase gene are resistant to salt stress. J. Plant Physiol. 163: 1179-84, 2006). In this study it was observed that the expression of cytosolic rice DHAR with 35S promoter in Arabidopsis contributes to increased ascorbate content of the plant, which leads to increased salt stress tolerance. Kwon, S. Y. et al. (Enhanced stress-tolerance of transgenic tobacco plants expressing a human dehydroascorbate reductase gene. J. Plant Physiol. 160: 347-53, 2003) discloses the over expression of human DHAR in chloroplast of tobacco and the resulting increased resistance to oxidative stress, cold and salt stress. Zou, L. et al. (Cloning and mapping of genes involved in tomato ascorbic acid biosynthesis and metabolism. Plant Sci. 170 (1), 120-127, 2006) discloses cloning and mapping of several tomato genes involved in ascorbic acid biosynthesis and metabolism and amongst them two DHAR genes in order to screen for candidate genes linked to tomato ascorbic acid biosynthesis and metabolism. Kato, Y. et al. (Purification and characterization of dehydroascorbate reductase from rice. Plant and Cell Physiology, 38, No. 2 173-178, 1997) disclose a method for enzymatic assay to evaluate DHAR activity.

### SUMMARY

### 1. Glutamate Dehydrogenase (GDH) Polypeptides

[0024] Surprisingly, it has now been found that modulating expression of a nucleic acid encoding a GDH polypeptide gives plants having enhanced yield-related traits, in particular increased yield and improved early vigour, relative to control plants.

[0025] According to one embodiment, there is provided a method for improving yield related traits of a plant relative to control plants, comprising modulating expression of a nucleic acid encoding a GDH polypeptide in a plant.

### 2. Fasciclin-Like AGP (FLAs) Polypeptides

[0026] Surprisingly, it has now been found that modulating expression of a nucleic acid encoding a FLA-like polypeptide gives plants having enhanced yield-related traits relative to control plants.

[0027] According to one embodiment, there is provided a method for enhancing yield-related traits in plants relative to control plants, comprising modulating expression in a plant of a nucleic acid encoding a FLA-like polypeptide.

### 3. Small Auxin-Up RNA (SAUR) Polypeptides

[0028] Surprisingly, it has now been found that modulating expression of a nucleic acid encoding a SAUR polypeptide gives plants having enhanced yield-related traits relative to control plants.

[0029] According to one embodiment, there is provided a method for enhancing (improving) yield-related traits in plants relative to control plants, comprising modulating expression in a plant of a nucleic acid encoding a SAUR polypeptide or modulating expression in a plant of a SAUR-based protein complex.

[0030] In order to decipher the biological networks influencing yield-traits in plants a SAUR protein centred approach was undertaken to study SAUR interacting proteins in Arabidopsis thaliana. The interactome and the regulon of SAUR proteins were used to make a selection of genes that act together with SAUR proteins in enhancing yield related traits of plants, referred to herein as SYNP (SAUR Yield Network protein) proteins.

[0031] Surprisingly, a subset of proteins belonging to the SYNP proteins group of proteins could be identified.

### 4. Dehydroascorbate Reductase (DHAR) Polypeptides

[0032] Surprisingly, it has now been found that modulating expression of a nucleic acid encoding a DHAR polypeptide gives plants having enhanced yield-related traits, in particular increased yield relative to control plants.

[0033] According one embodiment, there is provided a method for improving yield related traits in plants relative to control plants, comprising modulating expression in a plant of a nucleic acid encoding a DHAR polypeptide.

### DEFINITIONS

[0034] The following definitions will be used throughout the present specification.

### Polypeptide(s)/Protein(s)

[0035] The terms “polypeptide” and “protein” are used interchangeably herein and refer to amino acids in a polymeric form of any length, linked together by peptide bonds.

### Polynucleotide(s)/Nucleic Acid(s)/Nucleic Acid Sequence(s)/Nucleotide Sequence(s)

[0036] The terms “polynucleotide(s)”, “nucleic acid sequence(s)”, “nucleotide sequence(s)”, “nucleic acid(s)”, “nucleic acid molecule” are used interchangeably herein and refer to nucleotides, either ribonucleotides or deoxyribonucleotides or a combination of both, in a polymeric unbranched form of any length.

### Homologue(s)

[0037] “Homologues” of a protein encompass peptides, oligopeptides, polypeptides, proteins and enzymes having amino acid substitutions, deletions and/or insertions relative to the unmodified protein in question and having similar biological and functional activity as the unmodified protein from which they are derived.

[0038] A deletion refers to removal of one or more amino acids from a protein.

[0039] An insertion refers to one or more amino acid residues being introduced into a predetermined site in a protein. Insertions may comprise N-terminal and/or C-terminal fusions as well as intra-sequence insertions of single or multiple amino acids. Generally, insertions within the amino acid sequence will be smaller than N- or C-terminal fusions, of the order of about 1 to 10 residues. Examples of N- or C-terminal fusion proteins or peptides include the binding domain or activation domain of a transcriptional activator as used in the yeast two-hybrid system, phage coat proteins, (histidine)-6-tag, glutathione S-transferase-tag, protein A, maltose-binding protein, dihydrofolate reductase, Tag100 epitope, c-myc epitope, FLAG®-epitope, lacZ, CMP (calmodulin-binding peptide), HA epitope, protein C epitope and VSV epitope.

[0040] A substitution refers to replacement of amino acids of the protein with other amino acids having similar properties (such as similar hydrophobicity, hydrophilicity, antigenicity, propensity to form or break α-helical structures or β-sheet structures). Amino acid substitutions are typically of single residues, but may be clustered depending upon functional constraints placed upon the polypeptide and may range from 1 to 10 amino acids; insertions will usually be of the order of about 1 to 10 amino acid residues. The amino acid substitutions are preferably conservative amino acid substitutions. Conservative substitution tables are well known in the art (see for example Creighton (1984) Proteins. W.H. Freeman and Company (Eds) and Table 1 below).

TABLE 1
Examples of conserved amino acid substitutions

| | Conservative | | Conservative |
|---|---|---|---|
| Residue | Substitutions | Residue | Substitutions |
| Ala | Ser | Leu | Ile; Val |
| Arg | Lys | Lys | Arg; Gln |
| Asn | Gln; His | Met | Leu; Ile |
| Asp | Glu | Phe | Met; Leu; Tyr |
| Gln | Asn | Ser | Thr; Gly |
| Cys | Ser | Thr | Ser; Val |
| Glu | Asp | Trp | Tyr |
| Gly | Pro | Tyr | Trp; Phe |
| His | Asn; Gln | Val | Ile; Leu |
| Ile | Leu, Val | | |

[0041] Amino acid substitutions, deletions and/or insertions may readily be made using peptide synthetic techniques well known in the art, such as solid phase peptide synthesis and the like, or by recombinant DNA manipulation. Methods for the manipulation of DNA sequences to produce substitution, insertion or deletion variants of a protein are well known in the art. For example, techniques for making substitution mutations at predetermined sites in DNA are well known to those skilled in the art and include M13 mutagenesis, T7-Gen in vitro mutagenesis (USB, Cleveland, Ohio), QuickChange Site Directed mutagenesis (Stratagene, San Diego, Calif.), PCR-mediated site-directed mutagenesis or other site-directed mutagenesis protocols.

### Derivatives

[0042] “Derivatives” include peptides, oligopeptides, polypeptides which may, compared to the amino acid sequence of the naturally-occurring form of the protein, such as the protein of interest, comprise substitutions of amino acids with non-naturally occurring amino acid residues, or additions of non-naturally occurring amino acid residues. “Derivatives” of a protein also encompass peptides, oligopeptides, polypeptides which comprise naturally occurring altered (glycosylated, acylated, prenylated, phosphorylated, myristoylated, sulphated etc.) or non-naturally altered amino acid residues compared to the amino acid sequence of a naturally-occurring form of the polypeptide. A derivative may also comprise one or more non-amino acid substituents or additions compared to the amino acid sequence from which it is derived, for example a reporter molecule or other ligand, covalently or non-covalently bound to the amino acid sequence, such as a reporter molecule which is bound to facilitate its detection, and non-naturally occurring amino acid residues relative to the amino acid sequence of a naturally-occurring protein. Furthermore, “derivatives” also include fusions of the naturally-occurring form of the protein with tagging peptides such as FLAG, HIS6 or thioredoxin (for a review of tagging peptides, see Terpe, Appl. Microbiol. Biotechnol. 60, 523-533, 2003).

### Orthologue(s)/Paralogue(s)

[0043] Orthologues and paralogues encompass evolutionary concepts used to describe the ancestral relationships of genes. Paralogues are genes within the same species that have originated through duplication of an ancestral gene; orthologues are genes from different organisms that have originated through speciation, and are also derived from a common ancestral gene.

### Domain, Motif/Consensus Sequence/Signature

[0044] The term “domain” refers to a set of amino acids conserved at specific positions along an alignment of sequences of evolutionarily related proteins. While amino acids at other positions can vary between homologues, amino acids that are highly conserved at specific positions indicate amino acids that are likely essential in the structure, stability or function of a protein. Identified by their high degree of conservation in aligned sequences of a family of protein homologues, they can be used as identifiers to determine if any polypeptide in question belongs to a previously identified polypeptide family.

[0045] The term “motif” or “consensus sequence” or “signature” refers to a short conserved region in the sequence of evolutionarily related proteins. Motifs are frequently highly conserved parts of domains, but may also include only part of the domain, or be located outside of conserved domain (if all of the amino acids of the motif fall outside of a defined domain).

[0046] Specialist databases exist for the identification of domains, for example, SMART (Schultz et al. (1998) Proc. Natl. Acad. Sci. USA 95, 5857-5864; Letunic et al. (2002) Nucleic Acids Res 30, 242-244), InterPro (Mulder et al., (2003) Nucl. Acids. Res. 31, 315-318), Prosite (Bucher and Bairoch (1994), A generalized profile syntax for biomolecular sequences motifs and its function in automatic sequence interpretation. (In) ISMB-94; Proceedings 2nd International Conference on Intelligent Systems for Molecular Biology. Altman R., Brutlag D., Karp P., Lathrop R., Searls D., Eds., pp 53-61, AAAI Press, Menlo Park; Hulo et al., Nucl. Acids. Res. 32:D134-D137, (2004)), or Pfam (Bateman et al., Nucleic Acids Research 30(1): 276-280 (2002)). A set of tools for in silico analysis of protein sequences is available on the ExPASy proteomics server (Swiss Institute of Bioinformatics (Gasteiger et al., ExPASy: the proteomics server for in-depth protein knowledge and analysis, Nucleic Acids Res. 31:3784-3788 (2003)). Domains or motifs may also be identified using routine techniques, such as by sequence alignment.

[0047] Methods for the alignment of sequences for comparison are well known in the art, such methods include GAP, BESTFIT, BLAST, FASTA and TFASTA. GAP uses the algorithm of Needleman and Wunsch ((1970) J Mol Biol 48: 443-453) to find the global (i.e. spanning the complete sequences) alignment of two sequences that maximizes the number of matches and minimizes the number of gaps. The BLAST algorithm (Altschul et al. (1990) J Mol Biol 215: 403-10) calculates percent sequence identity and performs a statistical analysis of the similarity between the two sequences. The software for performing BLAST analysis is publicly available through the National Centre for Biotechnology Information (NCBI). Homologues may readily be identified using, for example, the ClustalW multiple sequence alignment algorithm (version 1.83), with the default pairwise alignment parameters, and a scoring method in percentage. Global percentages of similarity and identity may also be determined using one of the methods available in the MatGAT software package (Campanella et al., BMC Bioinformatics. 2003 Jul. 10; 4:29. MatGAT: an application that generates similarity/identity matrices using protein or DNA sequences.). Minor manual editing may be performed to optimise alignment between conserved motifs, as would be apparent to a person skilled in the art. Furthermore, instead of using full-length sequences for the identification of homologues, specific domains may also be used. The sequence identity values may be determined over the entire nucleic acid or amino acid sequence or over selected domains or conserved motif(s), using the programs mentioned above using the default parameters. For local alignments, the Smith-Waterman algorithm is particularly useful (Smith T F, Waterman M S (1981) J. Mol. Biol 147(1); 195-7).

### Reciprocal BLAST

[0048] Typically, this involves a first BLAST involving BLASTing a query sequence (for example using any of the sequences listed in Table A of the Examples section) against any sequence database, such as the publicly available NCBI database. BLASTN or TBLASTX (using standard default values) are generally used when starting from a nucleotide sequence, and BLASTP or TBLASTN (using standard default values) when starting from a protein sequence. The BLAST results may optionally be filtered. The full-length sequences of either the filtered results or non-filtered results are then BLASTed back (second BLAST) against sequences from the organism from which the query sequence is derived. The results of the first and second BLASTs are then compared. A paralogue is identified if a high-ranking hit from the first blast is from the same species as from which the query sequence is derived, a BLAST back then ideally results in the query sequence amongst the highest hits; an orthologue is identified if a high-ranking hit in the first BLAST is not from the same species as from which the query sequence is derived, and preferably results upon BLAST back in the query sequence being among the highest hits.

[0049] High-ranking hits are those having a low E-value. The lower the E-value, the more significant the score (or in other words the lower the chance that the hit was found by chance). Computation of the E-value is well known in the art. In addition to E-values, comparisons are also scored by percentage identity. Percentage identity refers to the number of identical nucleotides (or amino acids) between the two compared nucleic acid (or polypeptide) sequences over a particular length. In the case of large families, ClustalW may be used, followed by a neighbour joining tree, to help visualize clustering of related genes and to identify orthologues and paralogues.

### Hybridisation

[0050] The term “hybridisation” as defined herein is a process wherein substantially homologous complementary nucleotide sequences anneal to each other. The hybridisation process can occur entirely in solution, i.e. both complementary nucleic acids are in solution. The hybridisation process can also occur with one of the complementary nucleic acids immobilised to a matrix such as magnetic beads, Sepharose beads or any other resin. The hybridisation process can furthermore occur with one of the complementary nucleic acids immobilised to a solid support such as a nitro-cellulose or nylon membrane or immobilised by e.g. photolithography to, for example, a siliceous glass support (the latter known as nucleic acid arrays or microarrays or as nucleic acid chips). In order to allow hybridisation to occur, the nucleic acid molecules are generally thermally or chemically denatured to melt a double strand into two single strands and/or to remove hairpins or other secondary structures from single stranded nucleic acids.

[0051] The term “stringency” refers to the conditions under which a hybridisation takes place. The stringency of hybridisation is influenced by conditions such as temperature, salt concentration, ionic strength and hybridisation buffer composition. Generally, low stringency conditions are selected to be about 30° C. lower than the thermal melting point (Tₘ) for the specific sequence at a defined ionic strength and pH. Medium stringency conditions are when the temperature is 20° C. below Tₘ, and high stringency conditions are when the temperature is 10° C. below Tₘ. High stringency hybridisation conditions are typically used for isolating hybridising sequences that have high sequence similarity to the target nucleic acid sequence. However, nucleic acids may deviate in sequence and still encode a substantially identical polypeptide, due to the degeneracy of the genetic code. Therefore medium stringency hybridisation conditions may sometimes be needed to identify such nucleic acid molecules.

[0052] The Tₘ is the temperature under defined ionic strength and pH, at which 50% of the target sequence hybridises to a perfectly matched probe. The Tₘ is dependent upon the solution conditions and the base composition and length of the probe. For example, longer sequences hybridise specifically at higher temperatures. The maximum rate of hybridisation is obtained from about 16° C. up to 32° C. below Tₘ. The presence of monovalent cations in the hybridisation solution reduce the electrostatic repulsion between the two nucleic acid strands thereby promoting hybrid formation; this effect is visible for sodium concentrations of up to 0.4M (for higher concentrations, this effect may be ignored). Formamide reduces the melting temperature of DNA-DNA and DNA-RNA duplexes with 0.6 to 0.7° C. for each percent formamide, and addition of 50% formamide allows hybridisation to be performed at 30 to 45° C., though the rate of hybridisation will be lowered. Base pair mismatches reduce the hybridisation rate and the thermal stability of the duplexes. On average and for large probes, the Tm decreases about 1° C. per % base mismatch. The Tₘ may be calculated using the following equations, depending on the types of hybrids:

1) DNA-DNA hybrids (Meinkoth and Wahl, Anal. Biochem., 138: 267-284, 1984):

Tₘ=81.5° C.+16.6×log₁₀[Na⁺]^{a}+0.41×%[G/C^{b}]−500×[L^{c}]⁻¹−0.61×% formamide

2) DNA-RNA or RNA-RNA hybrids:

Tₘ=79.8° C.+18.5(log₁₀[Na⁺]^{a})+0.58(% G/C^{b})+11.8(% G/C^{b})²−820/L^{c}

3) oligo-DNA or oligo-RNAs hybrids:

For <20 nucleotides: Tₘ=2(Iₙ)

For 20-35 nucleotides: Tₘ=22+1.46(Iₙ)
[0053] ^{a}or for other monovalent cation, but only accurate in the 0.01-0.4 M range.
[0054] ^{b}only accurate for % GC in the 30% to 75% range.
[0055] ^{c}L=length of duplex in base pairs.
[0056] ^{d}oligo, oligonucleotide; I_{n,}=effective length of primer=2×(no. of G/C)+(no. of A/T).

[0057] Non-specific binding may be controlled using any one of a number of known techniques such as, for example, blocking the membrane with protein containing solutions, additions of heterologous RNA, DNA, and SDS to the hybridisation buffer, and treatment with Rnase. For non-homologous probes, a series of hybridizations may be performed by varying one of (i) progressively lowering the annealing temperature (for example from 68° C. to 42° C.) or (ii) progressively lowering the formamide concentration (for example from 50% to 0%). The skilled artisan is aware of various parameters which may be altered during hybridisation and which will either maintain or change the stringency conditions.

[0058] Besides the hybridisation conditions, specificity of hybridisation typically also depends on the function of post-hybridisation washes. To remove background resulting from non-specific hybridisation, samples are washed with dilute salt solutions. Critical factors of such washes include the ionic strength and temperature of the final wash solution: the lower the salt concentration and the higher the wash temperature, the higher the stringency of the wash. Wash conditions are typically performed at or below hybridisation stringency. A positive hybridisation gives a signal that is at least twice of that of the background. Generally, suitable stringent conditions for nucleic acid hybridisation assays or gene amplification detection procedures are as set forth above. More or less stringent conditions may also be selected. The skilled artisan is aware of various parameters which may be altered during washing and which will either maintain or change the stringency conditions.

[0059] For example, typical high stringency hybridisation conditions for DNA hybrids longer than 50 nucleotides encompass hybridisation at 65° C. in 1×SSC or at 42° C. in 1×SSC and 50% formamide, followed by washing at 65° C. in 0.3×SSC. Examples of medium stringency hybridisation conditions for DNA hybrids longer than 50 nucleotides encompass hybridisation at 50° C. in 4×SSC or at 40° C. in 6×SSC and 50% formamide, followed by washing at 50° C. in 2×SSC. The length of the hybrid is the anticipated length for the hybridising nucleic acid. When nucleic acids of known sequence are hybridised, the hybrid length may be determined by aligning the sequences and identifying the conserved regions described herein. 1×SSC is 0.15M NaCl and 15 mM sodium citrate; the hybridisation solution and wash solutions may additionally include 5×Denhardt's reagent, 0.5-1.0% SDS, 100 μg/ml denatured, fragmented salmon sperm DNA, 0.5% sodium pyrophosphate.

[0060] For the purposes of defining the level of stringency, reference can be made to Sambrook et al. (2001) Molecular Cloning: a laboratory manual, 3^{rd} Edition, Cold Spring Harbor Laboratory Press, CSH, New York or to Current Protocols in Molecular Biology, John Wiley & Sons, N.Y. (1989 and yearly updates).

### Splice Variant

[0061] The term “splice variant” as used herein encompasses variants of a nucleic acid sequence in which selected introns and/or exons have been excised, replaced, displaced or added, or in which introns have been shortened or lengthened. Such variants will be ones in which the biological activity of the protein is substantially retained; this may be achieved by selectively retaining functional segments of the protein. Such splice variants may be found in nature or may be manmade. Methods for predicting and isolating such splice variants are well known in the art (see for example Foissac and Schiex (2005) BMC Bioinformatics 6: 25).

### Allelic Variant

[0062] Alleles or allelic variants are alternative forms of a given gene, located at the same chromosomal position. Allelic variants encompass Single Nucleotide Polymorphisms (SNPs), as well as Small Insertion/Deletion Polymorphisms (INDELs). The size of INDELs is usually less than 100 bp. SNPs and INDELs form the largest set of sequence variants in naturally occurring polymorphic strains of most organisms.

### Endogenous Gene

[0063] Reference herein to an “endogenous” gene not only refers to the gene in question as found in a plant in its natural form (i.e., without there being any human intervention), but also refers to that same gene (or a substantially homologous nucleic acid/gene) in an isolated form subsequently (re)introduced into a plant (a transgene). For example, a transgenic plant containing such a transgene may encounter a substantial reduction of the transgene expression and/or substantial reduction of expression of the endogenous gene. The isolated gene may be isolated from an organism or may be manmade, for example by chemical synthesis.

### Gene Shuffling/Directed Evolution

[0064] Gene shuffling or directed evolution consists of iterations of DNA shuffling followed by appropriate screening and/or selection to generate variants of nucleic acids or portions thereof encoding proteins having a modified biological activity (Castle et al., (2004) Science 304(5674): 1151-4; U.S. Pat. Nos. 5,811,238 and 6,395,547).

### Construct

[0065] Additional regulatory elements may include transcriptional as well as translational enhancers. Those skilled in the art will be aware of terminator and enhancer sequences that may be suitable for use in performing the invention. An intron sequence may also be added to the 5′ untranslated region (UTR) or in the coding sequence to increase the amount of the mature message that accumulates in the cytosol, as described in the definitions section. Other control sequences (besides promoter, enhancer, silencer, intron sequences, 3′UTR and/or 5′UTR regions) may be protein and/or RNA stabilizing elements. Such sequences would be known or may readily be obtained by a person skilled in the art.

[0066] The genetic constructs of the invention may further include an origin of replication sequence that is required for maintenance and/or replication in a specific cell type. One example is when a genetic construct is required to be maintained in a bacterial cell as an episomal genetic element (e.g. plasmid or cosmid molecule). Preferred origins of replication include, but are not limited to, the f1-ori and colE1.

[0067] For the detection of the successful transfer of the nucleic acid sequences as used in the methods of the invention and/or selection of transgenic plants comprising these nucleic acids, it is advantageous to use marker genes (or reporter genes). Therefore, the genetic construct may optionally comprise a selectable marker gene. Selectable markers are described in more detail in the “definitions” section herein. The marker genes may be removed or excised from the transgenic cell once they are no longer needed. Techniques for marker removal are known in the art, useful techniques are described above in the definitions section.

### Regulatory Element/Control Sequence/Promoter

[0068] The terms “regulatory element”, “control sequence” and “promoter” are all used interchangeably herein and are to be taken in a broad context to refer to regulatory nucleic acid sequences capable of effecting expression of the sequences to which they are ligated. The term “promoter” typically refers to a nucleic acid control sequence located upstream from the transcriptional start of a gene and which is involved in recognising and binding of RNA polymerase and other proteins, thereby directing transcription of an operably linked nucleic acid. Encompassed by the aforementioned terms are transcriptional regulatory sequences derived from a classical eukaryotic genomic gene (including the TATA box which is required for accurate transcription initiation, with or without a CCAAT box sequence) and additional regulatory elements (i.e. upstream activating sequences, enhancers and silencers) which alter gene expression in response to developmental and/or external stimuli, or in a tissue-specific manner. Also included within the term is a transcriptional regulatory sequence of a classical prokaryotic gene, in which case it may include a −35 box sequence and/or −10 box transcriptional regulatory sequences. The term “regulatory element” also encompasses a synthetic fusion molecule or derivative that confers, activates or enhances expression of a nucleic acid molecule in a cell, tissue or organ.

[0069] A “plant promoter” comprises regulatory elements, which mediate the expression of a coding sequence segment in plant cells. Accordingly, a plant promoter need not be of plant origin, but may originate from viruses or micro-organisms, for example from viruses which attack plant cells. The “plant promoter” can also originate from a plant cell, e.g. from the plant which is transformed with the nucleic acid sequence to be expressed in the inventive process and described herein. This also applies to other “plant” regulatory signals, such as “plant” terminators. The promoters upstream of the nucleotide sequences useful in the methods of the present invention can be modified by one or more nucleotide substitution(s), insertion(s) and/or deletion(s) without interfering with the functionality or activity of either the promoters, the open reading frame (ORF) or the 3′-regulatory region such as terminators or other 3′ regulatory regions which are located away from the ORF. It is furthermore possible that the activity of the promoters is increased by modification of their sequence, or that they are replaced completely by more active promoters, even promoters from heterologous organisms. For expression in plants, the nucleic acid molecule must, as described above, be linked operably to or comprise a suitable promoter which expresses the gene at the right point in time and with the required spatial expression pattern.

[0070] For the identification of functionally equivalent promoters, the promoter strength and/or expression pattern of a candidate promoter may be analysed for example by operably linking the promoter to a reporter gene and assaying the expression level and pattern of the reporter gene in various tissues of the plant. Suitable well-known reporter genes include for example beta-glucuronidase or beta-galactosidase. The promoter activity is assayed by measuring the enzymatic activity of the beta-glucuronidase or beta-galactosidase. The promoter strength and/or expression pattern may then be compared to that of a reference promoter (such as the one used in the methods of the present invention). Alternatively, promoter strength may be assayed by quantifying mRNA levels or by comparing mRNA levels of the nucleic acid used in the methods of the present invention, with mRNA levels of housekeeping genes such as 18S rRNA, using methods known in the art, such as Northern blotting with densitometric analysis of autoradiograms, quantitative real-time PCR or RT-PCR (Heid et al., 1996 Genome Methods 6: 986-994). Generally by “weak promoter” is intended a promoter that drives expression of a coding sequence at a low level. By “low level” is intended at levels of about 1/10,000 transcripts to about 1/100,000 transcripts, to about 1/500,0000 transcripts per cell. Conversely, a “strong promoter” drives expression of a coding sequence at high level, or at about 1/10 transcripts to about 1/100 transcripts to about 1/1000 transcripts per cell. Generally, by “medium strength promoter” is intended a promoter that drives expression of a coding sequence at a lower level than a strong promoter, in particular at a level that is in all instances below that obtained when under the control of a 35S CaMV promoter.

### Operably Linked

[0071] The term “operably linked” as used herein refers to a functional linkage between the promoter sequence and the gene of interest, such that the promoter sequence is able to initiate transcription of the gene of interest.

### Constitutive Promoter

[0072] A “constitutive promoter” refers to a promoter that is transcriptionally active during most, but not necessarily all, phases of growth and development and under most environmental conditions, in at least one cell, tissue or organ. Table 2a below gives examples of constitutive promoters.

TABLE 2a
Examples of constitutive promoters

| Gene Source | Reference |
|---|---|
| Actin | McElroy et al, Plant Cell, 2: 163-171, 1990 |
| HMGP | WO 2004/070039 |
| CAMV 35S | Odell et al, Nature, 313: 810-812, 1985 |
| CaMV 19S | Nilsson et al., Physiol. Plant. 100:456-462, 1997 |
| GOS2 | de Pater et al, Plant J November; 2(6):837-44, |
| | 1992, WO 2004/065596 |
| Ubiquitin | Christensen et al, Plant Mol. Biol. 18: 675-689, |
| | 1992 |
| Rice cyclophilin | Buchholz et al, Plant Mol Biol. 25(5): 837-43, |
| | 1994 |
| Maize H3 histone | Lepetit et al, Mol. Gen. Genet. 231:276-285, 1992 |
| Alfalfa H3 histone | Wu et al. Plant Mol. Biol. 11:641-649, 1988 |
| Actin 2 | An et al, Plant J. 10(1); 107-121, 1996 |
| 34S FMV | Sanger et al., Plant. Mol. Biol., 14, 1990: 433-443 |
| Rubisco small subunit | U.S. Pat. No. 4,962,028 |
| OCS | Leisner (1988) Proc Natl Acad Sci USA 85(5): |
| | 2553 |
| SAD1 | Jain et al., Crop Science, 39 (6), 1999: 1696 |
| SAD2 | Jain et al., Crop Science, 39 (6), 1999: 1696 |
| nos | Shaw et al. (1984) Nucleic Acids Res. |
| | 12(20):7831-7846 |
| V-ATPase | WO 01/14572 |
| Super promoter | WO 95/14098 |
| G-box proteins | WO 94/12015 |

### Ubiquitous Promoter

[0073] A ubiquitous promoter is active in substantially all tissues or cells of an organism.

### Developmentally-Regulated Promoter

[0074] A developmentally-regulated promoter is active during certain developmental stages or in parts of the plant that undergo developmental changes.

### Inducible Promoter

[0075] An inducible promoter has induced or increased transcription initiation in response to a chemical (for a review see Gatz 1997, Annu. Rev. Plant Physiol. Plant Mol. Biol., 48:89-108), environmental or physical stimulus, or may be “stress-inducible”, i.e. activated when a plant is exposed to various stress conditions, or a “pathogen-inducible” i.e. activated when a plant is exposed to exposure to various pathogens.

### Organ-Specific/Tissue-Specific Promoter

[0076] An organ-specific or tissue-specific promoter is one that is capable of preferentially initiating transcription in certain organs or tissues, such as the leaves, roots, seed tissue etc. For example, a “root-specific promoter” is a promoter that is transcriptionally active predominantly in plant roots, substantially to the exclusion of any other parts of a plant, whilst still allowing for any leaky expression in these other plant parts. Promoters able to initiate transcription in certain cells only are referred to herein as “cell-specific”.

[0077] Examples of root-specific promoters are listed in Table 2b below:

TABLE 2b
Examples of root-specific promoters

| Gene Source | Reference |
|---|---|
| RCc3 | Plant Mol Biol. 1995 January; 27(2):237-48 |
| Arabidopsis PHT1 | Koyama et al. J Biosci Bioeng. 2005 |
| | January; 99(1):38-42.; Mudge et al. |
| | (2002, Plant J. 31:341) |
| Medicago phosphate | Xiao et al., 2006, Plant Biol (Stuttg). |
| transporter | 2006 July; 8(4):439-49 |
| Arabidopsis Pyk10 | Nitz et al. (2001) Plant Sci 161(2): |
| | 337-346 |
| root-expressible genes | Tingey et al., EMBO J. 6: 1, 1987. |
| tobacco auxin-inducible | Van der Zaal et al., Plant Mol. Biol. |
| gene | 16, 983, 1991. |
| β-tubulin | Oppenheimer, et al., Gene 63: 87, 1988. |
| tobacco root-specific genes | Conkling, et al., Plant Physiol. 93: 1203, |
| | 1990. |
| B. napus G1-3b gene | U.S. Pat. No. 5,401,836 |
| SbPRP1 | Suzuki et al., Plant Mol. Biol. 21: 109-119, |
| | 1993. |
| LRX1 | Baumberger et al. 2001, Genes & Dev. |
| | 15:1128 |
| BTG-26 Brassica napus | US 20050044585 |
| LeAMT1 (tomato) | Lauter et al. (1996, PNAS 3:8139) |
| The LeNRT1-1 (tomato) | Lauter et al. (1996, PNAS 3:8139) |
| class I patatin gene (potato) | Liu et al., Plant Mol. Biol. 17 (6): 1139- |
| | 1154 |
| KDC1 (Daucus carota) | Downey et al. (2000, J. Biol. Chem. |
| | 275:39420) |
| TobRB7 gene | W Song (1997) PhD Thesis, North Carolina |
| | State University, Raleigh, NC USA |
| OsRAB5a (rice) | Wang et al. 2002, Plant Sci. 163:273 |
| ALF5 (Arabidopsis) | Diener et al. (2001, Plant Cell 13:1625) |
| NRT2;1Np (N. | Quesada et al. (1997, Plant Mol. Biol. |
| plumbaginifolia) | 34:265) |

[0078] A seed-specific promoter is transcriptionally active predominantly in seed tissue, but not necessarily exclusively in seed tissue (in cases of leaky expression). The seed-specific promoter may be active during seed development and/or during germination. The seed specific promoter may be endosperm/aleurone/embryo specific. Examples of seed-specific promoters (endosperm/aleurone/embryo specific) are shown in Table 2c to Table 2f below. Further examples of seed-specific promoters are given in Qing Qu and Takaiwa (Plant Biotechnol. J. 2, 113-125, 2004), which disclosure is incorporated by reference herein as if fully set forth.

TABLE 2c
Examples of seed-specific promoters

| Gene source | Reference |
|---|---|
| seed-specific genes | Simon et al., Plant Mol. Biol. 5: 191, 1985; |
| | Scofield et al., J. Biol. Chem. 262: 12202, |
| | 1987.; Baszczynski et al., Plant Mol. Biol. |
| | 14: 633, 1990. |
| Brazil Nut albumin | Pearson et al., Plant Mol. Biol. 18: 235- |
| | 245, 1992. |
| legumin | Ellis et al., Plant Mol. Biol. 10: 203-214, |
| | 1988. |
| glutelin (rice) | Takaiwa et al., Mol. Gen. Genet. 208: |
| | 15-22, 1986; Takaiwa et al., FEBS Letts. |
| | 221: 43-47, 1987. |
| zein | Matzke et al Plant Mol Biol, 14(3): 323- |
| | 32 1990 |
| napA | Stalberg et al, Planta 199: 515-519, 1996. |
| wheat LMW and HMW | Mol Gen Genet 216:81-90, 1989; |
| glutenin-1 | NAR 17:461-2, 1989 |
| wheat SPA | Albani et al, Plant Cell, 9: 171-184, 1997 |
| wheat α, β, γ-gliadins | EMBO J. 3:1409-15, 1984 |
| barley ltr1 promoter | Diaz et al. (1995) Mol Gen Genet |
| | 248(5):592-8 |
| barley B1, C, D, hordein | Theor Appl Gen 98:1253-62, 1999; Plant J |
| | 4:343-55, 1993; Mol Gen Genet |
| | 250:750-60, 1996 |
| barley DOF | Mena et al, The Plant Journal, 116(1): |
| | 53-62, 1998 |
| blz2 | EP99106056.7 |
| synthetic promoter | Vicente-Carbajosa et al., Plant J. 13: |
| | 629-640, 1998. |
| rice prolamin NRP33 | Wu et al, Plant Cell Physiology 39(8) |
| | 885-889, 1998 |
| rice a-globulin Glb-1 | Wu et al, Plant Cell Physiology 39(8) |
| | 885-889, 1998 |
| rice OSH1 | Sato et al, Proc. Natl. Acad. Sci. USA, 93: |
| | 8117-8122, 1996 |
| rice α-globulin REB/OHP-1 | Nakase et al. Plant Mol. Biol. 33: 513- |
| | 522, 1997 |
| rice ADP-glucose pyrophos- | Trans Res 6:157-68, 1997 |
| phorylase | |
| maize ESR gene family | Plant J 12:235-46, 1997 |
| sorghum α-kafirin | DeRose et al., Plant Mol. Biol 32:1029- |
| | 35, 1996 |
| KNOX | Postma-Haarsma et al, Plant Mol. Biol. |
| | 39:257-71, 1999 |
| rice oleosin | Wu et al, J. Biochem. 123:386, 1998 |
| sunflower oleosin | Cummins et al., Plant Mol. Biol. 19: 873- |
| | 876, 1992 |
| PRO0117, putative rice 40S | WO 2004/070039 |
| ribosomal protein | |
| PRO0136, rice alanine | unpublished |
| aminotransferase | |
| PRO0147, trypsin inhibitor | unpublished |
| ITR1 (barley) | |
| PRO0151, rice WSI18 | WO 2004/070039 |
| PRO0175, rice RAB21 | WO 2004/070039 |
| PRO005 | WO 2004/070039 |
| PRO0095 | WO 2004/070039 |
| α-amylase (Amy32b) | Lanahan et al, Plant Cell 4:203-211, 1992; |
| | Skriver et al, Proc Natl Acad Sci USA |
| | 88:7266-7270, 1991 |
| cathepsin β-like gene | Cejudo et al, Plant Mol Biol 20:849-856, |
| | 1992 |
| Barley Ltp2 | Kalla et al., Plant J. 6:849-60, 1994 |
| Chi26 | Leah et al., Plant J. 4:579-89, 1994 |
| Maize B-Peru | Selinger et al., Genetics 149;1125-38, 1998 |

TABLE 2d
examples of endosperm-specific promoters

| Gene source | Reference |
|---|---|
| glutelin (rice) | Takaiwa et al. (1986) Mol Gen Genet |
| | 208:15-22; Takaiwa et al. (1987) FEBS |
| | Letts. 221:43-47 |
| zein | Matzke et al., (1990) Plant Mol Biol |
| | 14(3): 323-32 |
| wheat LMW and HMW | Colot et al. (1989) Mol Gen Genet |
| glutenin-1 | 216:81-90, Anderson et al. (1989) |
| | NAR 17:461-2 |
| wheat SPA | Albani et al. (1997) Plant Cell 9:171-184 |
| wheat gliadins | Rafalski et al. (1984) EMBO 3:1409-15 |
| barley ltr1 promoter | Diaz et al. (1995) Mol Gen Genet |
| | 248(5):592-8 |
| barley B1, C, D, hordein | Cho et al. (1999) Theor Appl Genet |
| | 98:1253-62; Muller et al. (1993) Plant |
| | J 4:343-55; Sorenson et al. (1996) Mol |
| | Gen Genet 250:750-60 |
| barley DOF | Mena et al, (1998) Plant J 116(1): 53-62 |
| blz2 | Onate et al. (1999) J Biol Chem |
| | 274(14):9175-82 |
| synthetic promoter | Vicente-Carbajosa et al. (1998) Plant J |
| | 13:629-640 |
| rice prolamin NRP33 | Wu et al, (1998) Plant Cell Physiol |
| | 39(8) 885-889 |
| rice globulin Glb-1 | Wu et al. (1998) Plant Cell Physiol |
| | 39(8) 885-889 |
| rice globulin REB/OHP-1 | Nakase et al. (1997) Plant Molec Biol |
| | 33: 513-522 |
| rice ADP-glucose pyrophos- | Russell et al. (1997) Trans Res 6:157-68 |
| phorylase | |
| maize ESR gene family | Opsahl-Ferstad et al. (1997) Plant J |
| | 12:235-46 |
| sorghum kafirin | DeRose et al. (1996) Plant Mol Biol |
| | 32:1029-35 |

TABLE 2e
Examples of embryo specific promoters:

| Gene source | Reference |
|---|---|
| rice OSH1 | Sato et al, Proc. Natl. Acad. Sci. USA, 93: 8117-8122, 1996 |
| KNOX | Postma-Haarsma et al, Plant Mol. Biol. 39:257-71, 1999 |
| PRO0151 | WO 2004/070039 |
| PRO0175 | WO 2004/070039 |
| PRO005 | WO 2004/070039 |
| PRO0095 | WO 2004/070039 |

TABLE 2f
Examples of aleurone-specific promoters:

| Gene source | Reference |
|---|---|
| α-amylase (Amy32b) | Lanahan et al, Plant Cell 4:203-211, 1992; Skriver |
| | et al, Proc Natl Acad Sci USA 88:7266-7270, 1991 |
| cathepsin β-like gene | Cejudo et al, Plant Mol Biol 20:849-856, 1992 |
| Barley Ltp2 | Kalla et al., Plant J. 6:849-60, 1994 |
| Chi26 | Leah et al., Plant J. 4:579-89, 1994 |
| Maize B-Peru | Selinger et al., Genetics 149; 1125-38, 1998 |

[0079] A green tissue-specific promoter as defined herein is a promoter that is transcriptionally active predominantly in green tissue, substantially to the exclusion of any other parts of a plant, whilst still allowing for any leaky expression in these other plant parts.

[0080] Examples of green tissue-specific promoters which may be used to perform the methods of the invention are shown in Table 2g below.

TABLE 2g
Examples of green tissue-specific promoters

| Gene | Expression | Reference |
|---|---|---|
| Maize Orthophosphate | Leaf | Fukavama et al., Plant |
| dikinase | specific | Physiol. 2001 November; |
| | | 127(3):1136-46 |
| Maize Phosphoenolpyruvate | Leaf | Kausch et al., Plant Mol Biol. |
| carboxylase | specific | 2001 January; 45(1):1-15 |
| Rice Phosphoenolpyruvate | Leaf | Lin et al., 2004 DNA Seq. |
| carboxylase | specific | 2004 August; 15(4):269-76 |
| Rice small subunit Rubisco | Leaf | Nomura et al., Plant Mol |
| | specific | Biol. 2000 September; |
| | | 44(1):99-106 |
| rice beta expansin EXBP9 | Shoot | WO 2004/070039 |
| | specific | |
| Pigeonpea small subunit | Leaf | Panguluri et al., Indian J Exp |
| Rubisco | specific | Biol. 2005 April; 43(4):369-72 |
| Pea RBCS3A | Leaf | |
| | specific | |

[0081] Another example of a tissue-specific promoter is a meristem-specific promoter, which is transcriptionally active predominantly in meristematic tissue, substantially to the exclusion of any other parts of a plant, whilst still allowing for any leaky expression in these other plant parts. Examples of green meristem-specific promoters which may be used to perform the methods of the invention are shown in Table 2h below.

TABLE 2h
Examples of meristem-specific promoters

| Gene source | Expression pattern | Reference |
|---|---|---|
| rice OSH1 | Shoot apical meristem, | Sato et al. (1996) Proc. |
| | from embryo globular stage | Natl. Acad. Sci. USA, |
| | to seedling stage | 93: 8117-8122 |
| Rice | Meristem specific | BAD87835.1 |
| metallothionein | | |
| WAK1 & | Shoot and root apical | Wagner & Kohorn |
| WAK 2 | meristems, and in | (2001) Plant Cell |
| | expanding leaves and | 13(2): 303-318 |
| | sepals | |

### Terminator

[0082] The term “terminator” encompasses a control sequence which is a DNA sequence at the end of a transcriptional unit which signals 3′ processing and polyadenylation of a primary transcript and termination of transcription. The terminator can be derived from the natural gene, from a variety of other plant genes, or from T-DNA. The terminator to be added may be derived from, for example, the nopaline synthase or octopine synthase genes, or alternatively from another plant gene, or less preferably from any other eukaryotic gene.

### Selectable Marker (Gene)/Reporter Gene

[0083] “Selectable marker”, “selectable marker gene” or “reporter gene” includes any gene that confers a phenotype on a cell in which it is expressed to facilitate the identification and/or selection of cells that are transfected or transformed with a nucleic acid construct of the invention. These marker genes enable the identification of a successful transfer of the nucleic acid molecules via a series of different principles. Suitable markers may be selected from markers that confer antibiotic or herbicide resistance, that introduce a new metabolic trait or that allow visual selection. Examples of selectable marker genes include genes conferring resistance to antibiotics (such as nptII that phosphorylates neomycin and kanamycin, or hpt, phosphorylating hygromycin, or genes conferring resistance to, for example, bleomycin, streptomycin, tetracyclin, chloramphenicol, ampicillin, gentamycin, geneticin (G418), spectinomycin or blasticidin), to herbicides (for example bar which provides resistance to Basta®; aroA or gox providing resistance against glyphosate, or the genes conferring resistance to, for example, imidazolinone, phosphinothricin or sulfonylurea), or genes that provide a metabolic trait (such as manA that allows plants to use mannose as sole carbon source or xylose isomerase for the utilisation of xylose, or antinutritive markers such as the resistance to 2-deoxyglucose). Expression of visual marker genes results in the formation of colour (for example β-glucuronidase, GUS or β-galactosidase with its coloured substrates, for example X-Gal), luminescence (such as the luciferin/luceferase system) or fluorescence (Green Fluorescent Protein, GFP, and derivatives thereof). This list represents only a small number of possible markers. The skilled worker is familiar with such markers. Different markers are preferred, depending on the organism and the selection method.

[0084] It is known that upon stable or transient integration of nucleic acids into plant cells, only a minority of the cells takes up the foreign DNA and, if desired, integrates it into its genome, depending on the expression vector used and the transfection technique used. To identify and select these integrants, a gene coding for a selectable marker (such as the ones described above) is usually introduced into the host cells together with the gene of interest. These markers can for example be used in mutants in which these genes are not functional by, for example, deletion by conventional methods. Furthermore, nucleic acid molecules encoding a selectable marker can be introduced into a host cell on the same vector that comprises the sequence encoding the polypeptides of the invention or used in the methods of the invention, or else in a separate vector. Cells which have been stably transfected with the introduced nucleic acid can be identified for example by selection (for example, cells which have integrated the selectable marker survive whereas the other cells die).

[0085] Since the marker genes, particularly genes for resistance to antibiotics and herbicides, are no longer required or are undesired in the transgenic host cell once the nucleic acids have been introduced successfully, the process according to the invention for introducing the nucleic acids advantageously employs techniques which enable the removal or excision of these marker genes. One such a method is what is known as co-transformation. The co-transformation method employs two vectors simultaneously for the transformation, one vector bearing the nucleic acid according to the invention and a second bearing the marker gene(s). A large proportion of transformants receives or, in the case of plants, comprises (up to 40% or more of the transformants), both vectors. In case of transformation with Agrobacteria, the transformants usually receive only a part of the vector, i.e. the sequence flanked by the T-DNA, which usually represents the expression cassette. The marker genes can subsequently be removed from the transformed plant by performing crosses. In another method, marker genes integrated into a transposon are used for the transformation together with desired nucleic acid (known as the Ac/Ds technology). The transformants can be crossed with a transposase source or the transformants are transformed with a nucleic acid construct conferring expression of a transposase, transiently or stable. In some cases (approx. 10%), the transposon jumps out of the genome of the host cell once transformation has taken place successfully and is lost. In a further number of cases, the transposon jumps to a different location. In these cases the marker gene must be eliminated by performing crosses. In microbiology, techniques were developed which make possible, or facilitate, the detection of such events. A further advantageous method relies on what is known as recombination systems; whose advantage is that elimination by crossing can be dispensed with. The best-known system of this type is what is known as the Cre/lox system. Cre1 is a recombinase that removes the sequences located between the loxP sequences. If the marker gene is integrated between the loxP sequences, it is removed once transformation has taken place successfully, by expression of the recombinase. Further recombination systems are the HIN/HIX, FLP/FRT and REP/STB system (Tribble et al., J. Biol. Chem., 275, 2000: 22255-22267; Velmurugan et al., J. Cell Biol., 149, 2000: 553-566). A site-specific integration into the plant genome of the nucleic acid sequences according to the invention is possible. Naturally, these methods can also be applied to microorganisms such as yeast, fungi or bacteria.

### Transgenic/Transgene/Recombinant

[0086] For the purposes of the invention, “transgenic”, “transgene” or “recombinant” means with regard to, for example, a nucleic acid sequence, an expression cassette, gene construct or a vector comprising the nucleic acid sequence or an organism transformed with the nucleic acid sequences, expression cassettes or vectors according to the invention, all those constructions brought about by recombinant methods in which either
[0087] (a) the nucleic acid sequences encoding proteins useful in the methods of the invention, or
[0088] (b) genetic control sequence(s) which is operably linked with the nucleic acid sequence according to the invention, for example a promoter, or
[0089] (c) a) and b)
   are not located in their natural genetic environment or have been modified by recombinant methods, it being possible for the modification to take the form of, for example, a substitution, addition, deletion, inversion or insertion of one or more nucleotide residues. The natural genetic environment is understood as meaning the natural genomic or chromosomal locus in the original plant or the presence in a genomic library. In the case of a genomic library, the natural genetic environment of the nucleic acid sequence is preferably retained, at least in part. The environment flanks the nucleic acid sequence at least on one side and has a sequence length of at least 50 bp, preferably at least 500 bp, especially preferably at least 1000 bp, most preferably at least 5000 bp. A naturally occurring expression cassette—for example the naturally occurring combination of the natural promoter of the nucleic acid sequences with the corresponding nucleic acid sequence encoding a polypeptide useful in the methods of the present invention, as defined above—becomes a transgenic expression cassette when this expression cassette is modified by non-natural, synthetic (“artificial”) methods such as, for example, mutagenic treatment. Suitable methods are described, for example, in U.S. Pat. No. 5,565,350 or WO 00/15815.

[0090] A transgenic plant for the purposes of the invention is thus understood as meaning, as above, that the nucleic acids used in the method of the invention are not present in, or originating from, the genome of said plant, or are present in the genome of said plant but not at their natural locus in the genome of said plant, it being possible for the nucleic acids to be expressed homologously or heterologously. However, as mentioned, transgenic also means that, while the nucleic acids according to the invention or used in the inventive method are at their natural position in the genome of a plant, the sequence has been modified with regard to the natural sequence, and/or that the regulatory sequences of the natural sequences have been modified. Transgenic is preferably understood as meaning the expression of the nucleic acids according to the invention at an unnatural locus in the genome, i.e. homologous or, preferably, heterologous expression of the nucleic acids takes place. Preferred transgenic plants are mentioned herein.

[0091] It shall further be noted that in the context of the present invention, the term “isolated nucleic acid” or “isolated polypeptide” may in some instances be considered as a synonym for a “recombinant nucleic acid” or a “recombinant polypeptide”, respectively and refers to a nucleic acid or polypeptide that is not located in its natural genetic environment and/or that has been modified by recombinant methods.

### Modulation

[0092] The term “modulation” means in relation to expression or gene expression, a process in which the expression level is changed by said gene expression in comparison to the control plant, the expression level may be increased or decreased. The original, unmodulated expression may be of any kind of expression of a structural RNA (rRNA, tRNA) or mRNA with subsequent translation. For the purposes of this invention, the original unmodulated expression may also be absence of any expression. The term “modulating the activity” shall mean any change of the expression of the inventive nucleic acid sequences or encoded proteins, which leads to increased yield and/or increased growth of the plants. The expression can increase from zero (absence of, or immeasurable expression) to a certain amount, or can decrease from a certain amount to immeasurable small amounts or zero.

### Expression

[0093] The term “expression” or “gene expression” means the transcription of a specific gene or specific genes or specific genetic construct. The term “expression” or “gene expression” in particular means the transcription of a gene or genes or genetic construct into structural RNA (rRNA, tRNA) or mRNA with or without subsequent translation of the latter into a protein. The process includes transcription of DNA and processing of the resulting mRNA product.

### Increased Expression/Overexpression

[0094] The term “increased expression” or “overexpression” as used herein means any form of expression that is additional to the original wild-type expression level. For the purposes of this invention, the original wild-type expression level might also be zero, i.e. absence of expression or immeasurable expression.

[0095] Methods for increasing expression of genes or gene products are well documented in the art and include, for example, overexpression driven by appropriate promoters, the use of transcription enhancers or translation enhancers. Isolated nucleic acids which serve as promoter or enhancer elements may be introduced in an appropriate position (typically upstream) of a non-heterologous form of a polynucleotide so as to upregulate expression of a nucleic acid encoding the polypeptide of interest. For example, endogenous promoters may be altered in vivo by mutation, deletion, and/or substitution (see, Kmiec, U.S. Pat. No. 5,565,350; Zarling et al., WO9322443), or isolated promoters may be introduced into a plant cell in the proper orientation and distance from a gene of the present invention so as to control the expression of the gene.

[0096] If polypeptide expression is desired, it is generally desirable to include a polyadenylation region at the 3′-end of a polynucleotide coding region. The polyadenylation region can be derived from the natural gene, from a variety of other plant genes, or from T-DNA. The 3′ end sequence to be added may be derived from, for example, the nopaline synthase or octopine synthase genes, or alternatively from another plant gene, or less preferably from any other eukaryotic gene.

[0097] An intron sequence may also be added to the 5′ untranslated region (UTR) or the coding sequence of the partial coding sequence to increase the amount of the mature message that accumulates in the cytosol. Inclusion of a spliceable intron in the transcription unit in both plant and animal expression constructs has been shown to increase gene expression at both the mRNA and protein levels up to 1000-fold (Buchman and Berg (1988) Mol. Cell biol. 8: 4395-4405; Callis et al. (1987) Genes Dev 1:1183-1200). Such intron enhancement of gene expression is typically greatest when placed near the 5′ end of the transcription unit. Use of the maize introns Adh1-S intron 1, 2, and 6, the Bronze-1 intron are known in the art. For general information see: The Maize Handbook, Chapter 116, Freeling and Walbot, Eds., Springer, N.Y. (1994).

### Decreased Expression

[0098] Reference herein to “decreased expression” or “reduction or substantial elimination” of expression is taken to mean a decrease in endogenous gene expression and/or polypeptide levels and/or polypeptide activity relative to control plants. The reduction or substantial elimination is in increasing order of preference at least 10%, 20%, 30%, 40% or 50%, 60%, 70%, 80%, 85%, 90%, or 95%, 96%, 97%, 98%, 99% or more reduced compared to that of control plants.

[0099] For the reduction or substantial elimination of expression an endogenous gene in a plant, a sufficient length of substantially contiguous nucleotides of a nucleic acid sequence is required. In order to perform gene silencing, this may be as little as 20, 19, 18, 17, 16, 15, 14, 13, 12, 11, 10 or fewer nucleotides, alternatively this may be as much as the entire gene (including the 5′ and/or 3′ UTR, either in part or in whole). The stretch of substantially contiguous nucleotides may be derived from the nucleic acid encoding the protein of interest (target gene), or from any nucleic acid capable of encoding an orthologue, paralogue or homologue of the protein of interest. Preferably, the stretch of substantially contiguous nucleotides is capable of forming hydrogen bonds with the target gene (either sense or antisense strand), more preferably, the stretch of substantially contiguous nucleotides has, in increasing order of preference, 50%, 60%, 70%, 80%, 85%, 90%, 95%, 96%, 97%, 98%, 99%, 100% sequence identity to the target gene (either sense or antisense strand). A nucleic acid sequence encoding a (functional) polypeptide is not a requirement for the various methods discussed herein for the reduction or substantial elimination of expression of an endogenous gene.

[0100] This reduction or substantial elimination of expression may be achieved using routine tools and techniques. A preferred method for the reduction or substantial elimination of endogenous gene expression is by introducing and expressing in a plant a genetic construct into which the nucleic acid (in this case a stretch of substantially contiguous nucleotides derived from the gene of interest, or from any nucleic acid capable of encoding an orthologue, paralogue or homologue of any one of the protein of interest) is cloned as an inverted repeat (in part or completely), separated by a spacer (non-coding DNA).

[0101] In such a preferred method, expression of the endogenous gene is reduced or substantially eliminated through RNA-mediated silencing using an inverted repeat of a nucleic acid or a part thereof (in this case a stretch of substantially contiguous nucleotides derived from the gene of interest, or from any nucleic acid capable of encoding an orthologue, paralogue or homologue of the protein of interest), preferably capable of forming a hairpin structure. The inverted repeat is cloned in an expression vector comprising control sequences. A non-coding DNA nucleic acid sequence (a spacer, for example a matrix attachment region fragment (MAR), an intron, a polylinker, etc.) is located between the two inverted nucleic acids forming the inverted repeat. After transcription of the inverted repeat, a chimeric RNA with a self-complementary structure is formed (partial or complete). This double-stranded RNA structure is referred to as the hairpin RNA (hpRNA). The hpRNA is processed by the plant into siRNAs that are incorporated into an RNA-induced silencing complex (RISC). The RISC further cleaves the mRNA transcripts, thereby substantially reducing the number of mRNA transcripts to be translated into polypeptides. For further general details see for example, Grierson et al. (1998) WO 98/53083; Waterhouse et al. (1999) WO 99/53050).

[0102] Performance of the methods of the invention does not rely on introducing and expressing in a plant a genetic construct into which the nucleic acid is cloned as an inverted repeat, but any one or more of several well-known “gene silencing” methods may be used to achieve the same effects.

[0103] One such method for the reduction of endogenous gene expression is RNA-mediated silencing of gene expression (downregulation). Silencing in this case is triggered in a plant by a double stranded RNA sequence (dsRNA) that is substantially similar to the target endogenous gene. This dsRNA is further processed by the plant into about 20 to about 26 nucleotides called short interfering RNAs (siRNAs). The siRNAs are incorporated into an RNA-induced silencing complex (RISC) that cleaves the mRNA transcript of the endogenous target gene, thereby substantially reducing the number of mRNA transcripts to be translated into a polypeptide. Preferably, the double stranded RNA sequence corresponds to a target gene.

[0104] Another example of an RNA silencing method involves the introduction of nucleic acid sequences or parts thereof (in this case a stretch of substantially contiguous nucleotides derived from the gene of interest, or from any nucleic acid capable of encoding an orthologue, paralogue or homologue of the protein of interest) in a sense orientation into a plant. “Sense orientation” refers to a DNA sequence that is homologous to an mRNA transcript thereof. Introduced into a plant would therefore be at least one copy of the nucleic acid sequence. The additional nucleic acid sequence will reduce expression of the endogenous gene, giving rise to a phenomenon known as co-suppression. The reduction of gene expression will be more pronounced if several additional copies of a nucleic acid sequence are introduced into the plant, as there is a positive correlation between high transcript levels and the triggering of co-suppression.

[0105] Another example of an RNA silencing method involves the use of antisense nucleic acid sequences. An “antisense” nucleic acid sequence comprises a nucleotide sequence that is complementary to a “sense” nucleic acid sequence encoding a protein, i.e. complementary to the coding strand of a double-stranded cDNA molecule or complementary to an mRNA transcript sequence. The antisense nucleic acid sequence is preferably complementary to the endogenous gene to be silenced. The complementarity may be located in the “coding region” and/or in the “non-coding region” of a gene. The term “coding region” refers to a region of the nucleotide sequence comprising codons that are translated into amino acid residues. The term “non-coding region” refers to 5′ and 3′ sequences that flank the coding region that are transcribed but not translated into amino acids (also referred to as 5′ and 3′ untranslated regions).

[0106] Antisense nucleic acid sequences can be designed according to the rules of Watson and Crick base pairing. The antisense nucleic acid sequence may be complementary to the entire nucleic acid sequence (in this case a stretch of substantially contiguous nucleotides derived from the gene of interest, or from any nucleic acid capable of encoding an orthologue, paralogue or homologue of the protein of interest), but may also be an oligonucleotide that is antisense to only a part of the nucleic acid sequence (including the mRNA 5′ and 3′ UTR). For example, the antisense oligonucleotide sequence may be complementary to the region surrounding the translation start site of an mRNA transcript encoding a polypeptide. The length of a suitable antisense oligonucleotide sequence is known in the art and may start from about 50, 45, 40, 35, 30, 25, 20, 15 or 10 nucleotides in length or less. An antisense nucleic acid sequence according to the invention may be constructed using chemical synthesis and enzymatic ligation reactions using methods known in the art. For example, an antisense nucleic acid sequence (e.g., an antisense oligonucleotide sequence) may be chemically synthesized using naturally occurring nucleotides or variously modified nucleotides designed to increase the biological stability of the molecules or to increase the physical stability of the duplex formed between the antisense and sense nucleic acid sequences, e.g., phosphorothioate derivatives and acridine substituted nucleotides may be used. Examples of modified nucleotides that may be used to generate the antisense nucleic acid sequences are well known in the art. Known nucleotide modifications include methylation, cyclization and ‘caps’ and substitution of one or more of the naturally occurring nucleotides with an analogue such as inosine. Other modifications of nucleotides are well known in the art.

[0107] The antisense nucleic acid sequence can be produced biologically using an expression vector into which a nucleic acid sequence has been subcloned in an antisense orientation (i.e., RNA transcribed from the inserted nucleic acid will be of an antisense orientation to a target nucleic acid of interest). Preferably, production of antisense nucleic acid sequences in plants occurs by means of a stably integrated nucleic acid construct comprising a promoter, an operably linked antisense oligonucleotide, and a terminator.

[0108] The nucleic acid molecules used for silencing in the methods of the invention (whether introduced into a plant or generated in situ) hybridize with or bind to mRNA transcripts and/or genomic DNA encoding a polypeptide to thereby inhibit expression of the protein, e.g., by inhibiting transcription and/or translation. The hybridization can be by conventional nucleotide complementarity to form a stable duplex, or, for example, in the case of an antisense nucleic acid sequence which binds to DNA duplexes, through specific interactions in the major groove of the double helix. Antisense nucleic acid sequences may be introduced into a plant by transformation or direct injection at a specific tissue site. Alternatively, antisense nucleic acid sequences can be modified to target selected cells and then administered systemically. For example, for systemic administration, antisense nucleic acid sequences can be modified such that they specifically bind to receptors or antigens expressed on a selected cell surface, e.g., by linking the antisense nucleic acid sequence to peptides or antibodies which bind to cell surface receptors or antigens. The antisense nucleic acid sequences can also be delivered to cells using the vectors described herein.

[0109] According to a further aspect, the antisense nucleic acid sequence is an a-anomeric nucleic acid sequence. An a-anomeric nucleic acid sequence forms specific double-stranded hybrids with complementary RNA in which, contrary to the usual b-units, the strands run parallel to each other (Gaultier et al. (1987) Nucl Ac Res 15: 6625-6641). The antisense nucleic acid sequence may also comprise a 2′-o-methylribonucleotide (Inoue et al. (1987) Nucl Ac Res 15, 6131-6148) or a chimeric RNA-DNA analogue (Inoue et al. (1987) FEBS Lett. 215, 327-330).

[0110] The reduction or substantial elimination of endogenous gene expression may also be performed using ribozymes. Ribozymes are catalytic RNA molecules with ribonuclease activity that are capable of cleaving a single-stranded nucleic acid sequence, such as an mRNA, to which they have a complementary region. Thus, ribozymes (e.g., hammerhead ribozymes (described in Haselhoff and Gerlach (1988) Nature 334, 585-591) can be used to catalytically cleave mRNA transcripts encoding a polypeptide, thereby substantially reducing the number of mRNA transcripts to be translated into a polypeptide. A ribozyme having specificity for a nucleic acid sequence can be designed (see for example: Cech et al. U.S. Pat. No. 4,987,071; and Cech et al. U.S. Pat. No. 5,116,742). Alternatively, mRNA transcripts corresponding to a nucleic acid sequence can be used to select a catalytic RNA having a specific ribonuclease activity from a pool of RNA molecules (Bartel and Szostak (1993) Science 261, 1411-1418). The use of ribozymes for gene silencing in plants is known in the art (e.g., Atkins et al. (1994) WO 94/00012; Lenne et al. (1995) WO 95/03404; Lutziger et al. (2000) WO 00/00619; Prinsen et al. (1997) WO 97/13865 and Scott et al. (1997) WO 97/38116).

[0111] Gene silencing may also be achieved by insertion mutagenesis (for example, T-DNA insertion or transposon insertion) or by strategies as described by, among others, Angell and Baulcombe ((1999) Plant J 20(3): 357-62), (Amplicon VIGS WO 98/36083), or Baulcombe (WO 99/15682).

[0112] Gene silencing may also occur if there is a mutation on an endogenous gene and/or a mutation on an isolated gene/nucleic acid subsequently introduced into a plant. The reduction or substantial elimination may be caused by a non-functional polypeptide. For example, the polypeptide may bind to various interacting proteins; one or more mutation(s) and/or truncation(s) may therefore provide for a polypeptide that is still able to bind interacting proteins (such as receptor proteins) but that cannot exhibit its normal function (such as signalling ligand).

[0113] A further approach to gene silencing is by targeting nucleic acid sequences complementary to the regulatory region of the gene (e.g., the promoter and/or enhancers) to form triple helical structures that prevent transcription of the gene in target cells. See Helene, C., Anticancer Drug Res. 6, 569-84, 1991; Helene et al., Ann. N.Y. Acad. Sci. 660, 27-36 1992; and Maher, L. J. Bioassays 14, 807-15, 1992.

[0114] Other methods, such as the use of antibodies directed to an endogenous polypeptide for inhibiting its function in planta, or interference in the signalling pathway in which a polypeptide is involved, will be well known to the skilled man. In particular, it can be envisaged that manmade molecules may be useful for inhibiting the biological function of a target polypeptide, or for interfering with the signalling pathway in which the target polypeptide is involved.

[0115] Alternatively, a screening program may be set up to identify in a plant population natural variants of a gene, which variants encode polypeptides with reduced activity. Such natural variants may also be used for example, to perform homologous recombination.

[0116] Artificial and/or natural microRNAs (miRNAs) may be used to knock out gene expression and/or mRNA translation. Endogenous miRNAs are single stranded small RNAs of typically 19-24 nucleotides long. They function primarily to regulate gene expression and/or mRNA translation. Most plant microRNAs (miRNAs) have perfect or near-perfect complementarity with their target sequences. However, there are natural targets with up to five mismatches. They are processed from longer non-coding RNAs with characteristic fold-back structures by double-strand specific RNases of the Dicer family. Upon processing, they are incorporated in the RNA-induced silencing complex (RISC) by binding to its main component, an Argonaute protein. mRNAs serve as the specificity components of RISC, since they base-pair to target nucleic acids, mostly mRNAs, in the cytoplasm. Subsequent regulatory events include target mRNA cleavage and destruction and/or translational inhibition. Effects of miRNA overexpression are thus often reflected in decreased mRNA levels of target genes.

[0117] Artificial microRNAs (amiRNAs), which are typically 21 nucleotides in length, can be genetically engineered specifically to negatively regulate gene expression of single or multiple genes of interest. Determinants of plant microRNA target selection are well known in the art. Empirical parameters for target recognition have been defined and can be used to aid in the design of specific amiRNAs, (Schwab et al., Dev. Cell 8, 517-527, 2005). Convenient tools for design and generation of amiRNAs and their precursors are also available to the public (Schwab et al., Plant Cell 18, 1121-1133, 2006).

[0118] For optimal performance, the gene silencing techniques used for reducing expression in a plant of an endogenous gene requires the use of nucleic acid sequences from monocotyledonous plants for transformation of monocotyledonous plants, and from dicotyledonous plants for transformation of dicotyledonous plants. Preferably, a nucleic acid sequence from any given plant species is introduced into that same species. For example, a nucleic acid sequence from rice is transformed into a rice plant. However, it is not an absolute requirement that the nucleic acid sequence to be introduced originates from the same plant species as the plant in which it will be introduced. It is sufficient that there is substantial homology between the endogenous target gene and the nucleic acid to be introduced.

[0119] Described above are examples of various methods for the reduction or substantial elimination of expression in a plant of an endogenous gene. A person skilled in the art would readily be able to adapt the aforementioned methods for silencing so as to achieve reduction of expression of an endogenous gene in a whole plant or in parts thereof through the use of an appropriate promoter, for example.

### Transformation

[0120] The term “introduction” or “transformation” as referred to herein encompasses the transfer of an exogenous polynucleotide into a host cell, irrespective of the method used for transfer. Plant tissue capable of subsequent clonal propagation, whether by organogenesis or embryogenesis, may be transformed with a genetic construct of the present invention and a whole plant regenerated there from. The particular tissue chosen will vary depending on the clonal propagation systems available for, and best suited to, the particular species being transformed. Exemplary tissue targets include leaf disks, pollen, embryos, cotyledons, hypocotyls, megagametophytes, callus tissue, existing meristematic tissue (e.g., apical meristem, axillary buds, and root meristems), and induced meristem tissue (e.g., cotyledon meristem and hypocotyl meristem). The polynucleotide may be transiently or stably introduced into a host cell and may be maintained non-integrated, for example, as a plasmid. Alternatively, it may be integrated into the host genome. The resulting transformed plant cell may then be used to regenerate a transformed plant in a manner known to persons skilled in the art.

[0121] The transfer of foreign genes into the genome of a plant is called transformation. Transformation of plant species is now a fairly routine technique. Advantageously, any of several transformation methods may be used to introduce the gene of interest into a suitable ancestor cell. The methods described for the transformation and regeneration of plants from plant tissues or plant cells may be utilized for transient or for stable transformation. Transformation methods include the use of liposomes, electroporation, chemicals that increase free DNA uptake, injection of the DNA directly into the plant, particle gun bombardment, transformation using viruses or pollen and microprojection. Methods may be selected from the calcium/polyethylene glycol method for protoplasts (Krens, F. A. et al., (1982) Nature 296, 72-74; Negrutiu I et al. (1987) Plant Mol Biol 8: 363-373); electroporation of protoplasts (Shillito R. D. et al. (1985) Bio/Technol 3, 1099-1102); microinjection into plant material (Crossway A et al., (1986) Mol. Gen Genet 202: 179-185); DNA or RNA-coated particle bombardment (Klein T M et al., (1987) Nature 327: 70) infection with (non-integrative) viruses and the like. Transgenic plants, including transgenic crop plants, are preferably produced via Agrobacterium-mediated transformation. An advantageous transformation method is the transformation in planta. To this end, it is possible, for example, to allow the agrobacteria to act on plant seeds or to inoculate the plant meristem with agrobacteria. It has proved particularly expedient in accordance with the invention to allow a suspension of transformed agrobacteria to act on the intact plant or at least on the flower primordia. The plant is subsequently grown on until the seeds of the treated plant are obtained (Clough and Bent, Plant J. (1998) 16, 735-743). Methods for Agrobacterium-mediated transformation of rice include well known methods for rice transformation, such as those described in any of the following: European patent application EP 1198985 A1, Aldemita and Hodges (Planta 199: 612-617, 1996); Chan et al. (Plant Mol Biol 22 (3): 491-506, 1993), Hiei et al. (Plant J 6 (2): 271-282, 1994), which disclosures are incorporated by reference herein as if fully set forth. In the case of corn transformation, the preferred method is as described in either Ishida et al. (Nat. Biotechnol 14(6): 745-50, 1996) or Frame et al. (Plant Physiol 129(1): 13-22, 2002), which disclosures are incorporated by reference herein as if fully set forth. Said methods are further described by way of example in B. Jenes et al., Techniques for Gene Transfer, in: Transgenic Plants, Vol. 1, Engineering and Utilization, eds. S. D. Kung and R. Wu, Academic Press (1993) 128-143 and in Potrykus Annu. Rev. Plant Physiol. Plant Molec. Biol. 42 (1991) 205-225). The nucleic acids or the construct to be expressed is preferably cloned into a vector, which is suitable for transforming Agrobacterium tumefaciens, for example pBin19 (Bevan et al., Nucl. Acids Res. 12 (1984) 8711). Agrobacteria transformed by such a vector can then be used in known manner for the transformation of plants, such as plants used as a model, like Arabidopsis (Arabidopsis thaliana is within the scope of the present invention not considered as a crop plant), or crop plants such as, by way of example, tobacco plants, for example by immersing bruised leaves or chopped leaves in an agrobacterial solution and then culturing them in suitable media. The transformation of plants by means of Agrobacterium tumefaciens is described, for example, by Höfgen and Willmitzer in Nucl. Acid Res. (1988) 16, 9877 or is known inter alia from F. F. White, Vectors for Gene Transfer in Higher Plants; in Transgenic Plants, Vol. 1, Engineering and Utilization, eds. S. D. Kung and R. Wu, Academic Press, 1993, pp. 15-38.

[0122] In addition to the transformation of somatic cells, which then have to be regenerated into intact plants, it is also possible to transform the cells of plant meristems and in particular those cells which develop into gametes. In this case, the transformed gametes follow the natural plant development, giving rise to transgenic plants. Thus, for example, seeds of Arabidopsis are treated with agrobacteria and seeds are obtained from the developing plants of which a certain proportion is transformed and thus transgenic [Feldman, K A and Marks M D (1987). Mol Gen Genet 208:1-9; Feldmann K (1992). In: C Koncz, N-H Chua and J Shell, eds, Methods in Arabidopsis Research. Word Scientific, Singapore, pp. 274-289]. Alternative methods are based on the repeated removal of the inflorescences and incubation of the excision site in the center of the rosette with transformed agrobacteria, whereby transformed seeds can likewise be obtained at a later point in time (Chang (1994). Plant J. 5: 551-558; Katavic (1994). Mol Gen Genet, 245: 363-370). However, an especially effective method is the vacuum infiltration method with its modifications such as the “floral dip” method. In the case of vacuum infiltration of Arabidopsis, intact plants under reduced pressure are treated with an agrobacterial suspension [Bechthold, N (1993). C R Acad Sci Paris Life Sci, 316: 1194-1199], while in the case of the “floral dip” method the developing floral tissue is incubated briefly with a surfactant-treated agrobacterial suspension [Clough, S J and Bent A F (1998) The Plant J. 16, 735-743]. A certain proportion of transgenic seeds are harvested in both cases, and these seeds can be distinguished from non-transgenic seeds by growing under the above-described selective conditions. In addition the stable transformation of plastids is of advantages because plastids are inherited maternally is most crops reducing or eliminating the risk of transgene flow through pollen. The transformation of the chloroplast genome is generally achieved by a process which has been schematically displayed in Klaus et al., 2004 [Nature Biotechnology 22 (2), 225-229]. Briefly the sequences to be transformed are cloned together with a selectable marker gene between flanking sequences homologous to the chloroplast genome. These homologous flanking sequences direct site specific integration into the plastome. Plastidal transformation has been described for many different plant species and an overview is given in Bock (2001) Transgenic plastids in basic research and plant biotechnology. J Mol Biol. 2001 Sep. 21; 312 (3):425-38 or Maliga, P (2003) Progress towards commercialization of plastid transformation technology. Trends Biotechnol. 21, 20-28. Further biotechnological progress has recently been reported in form of marker free plastid transformants, which can be produced by a transient co-integrated maker gene (Klaus et al., 2004, Nature Biotechnology 22(2), 225-229).

[0123] The genetically modified plant cells can be regenerated via all methods with which the skilled worker is familiar. Suitable methods can be found in the above-mentioned publications by S. D. Kung and R. Wu, Potrykus or Höfgen and Willmitzer.

[0124] Generally after transformation, plant cells or cell groupings are selected for the presence of one or more markers which are encoded by plant-expressible genes co-transferred with the gene of interest, following which the transformed material is regenerated into a whole plant. To select transformed plants, the plant material obtained in the transformation is, as a rule, subjected to selective conditions so that transformed plants can be distinguished from untransformed plants. For example, the seeds obtained in the above-described manner can be planted and, after an initial growing period, subjected to a suitable selection by spraying. A further possibility consists in growing the seeds, if appropriate after sterilization, on agar plates using a suitable selection agent so that only the transformed seeds can grow into plants. Alternatively, the transformed plants are screened for the presence of a selectable marker such as the ones described above.

[0125] Following DNA transfer and regeneration, putatively transformed plants may also be evaluated, for instance using Southern analysis, for the presence of the gene of interest, copy number and/or genomic organisation. Alternatively or additionally, expression levels of the newly introduced DNA may be monitored using Northern and/or Western analysis, both techniques being well known to persons having ordinary skill in the art.

[0126] The generated transformed plants may be propagated by a variety of means, such as by clonal propagation or classical breeding techniques. For example, a first generation (or T1) transformed plant may be selfed and homozygous second-generation (or T2) transformants selected, and the T2 plants may then further be propagated through classical breeding techniques. The generated transformed organisms may take a variety of forms. For example, they may be chimeras of transformed cells and non-transformed cells; clonal transformants (e.g., all cells transformed to contain the expression cassette); grafts of transformed and untransformed tissues (e.g., in plants, a transformed rootstock grafted to an untransformed scion).

### T-DNA Activation Tagging

[0127] T-DNA activation tagging (Hayashi et al. Science (1992) 1350-1353), involves insertion of T-DNA, usually containing a promoter (may also be a translation enhancer or an intron), in the genomic region of the gene of interest or 10 kb up- or downstream of the coding region of a gene in a configuration such that the promoter directs expression of the targeted gene. Typically, regulation of expression of the targeted gene by its natural promoter is disrupted and the gene falls under the control of the newly introduced promoter. The promoter is typically embedded in a T-DNA. This T-DNA is randomly inserted into the plant genome, for example, through Agrobacterium infection and leads to modified expression of genes near the inserted T-DNA. The resulting transgenic plants show dominant phenotypes due to modified expression of genes close to the introduced promoter.

### TILLING

[0128] The term “TILLING” is an abbreviation of “Targeted Induced Local Lesions In Genomes” and refers to a mutagenesis technology useful to generate and/or identify nucleic acids encoding proteins with modified expression and/or activity. TILLING also allows selection of plants carrying such mutant variants. These mutant variants may exhibit modified expression, either in strength or in location or in timing (if the mutations affect the promoter for example). These mutant variants may exhibit higher activity than that exhibited by the gene in its natural form. TILLING combines high-density mutagenesis with high-throughput screening methods. The steps typically followed in TILLING are: (a) EMS mutagenesis (Redei G P and Koncz C (1992) In Methods in Arabidopsis Research, Koncz C, Chua N H, Schell J, eds. Singapore, World Scientific Publishing Co, pp. 16-82; Feldmann et al., (1994) In Meyerowitz E M, Somerville C R, eds, Arabidopsis. Cold Spring Harbor Laboratory Press, Cold Spring Harbor, N.Y., pp 137-172; Lightner J and Caspar T (1998) In J Martinez-Zapater, J Salinas, eds, Methods on Molecular Biology, Vol. 82. Humana Press, Totowa, N.J., pp 91-104); (b) DNA preparation and pooling of individuals; (c) PCR amplification of a region of interest; (d) denaturation and annealing to allow formation of heteroduplexes; (e) DHPLC, where the presence of a heteroduplex in a pool is detected as an extra peak in the chromatogram; (f) identification of the mutant individual; and (g) sequencing of the mutant PCR product. Methods for TILLING are well known in the art (McCallum et al., (2000) Nat Biotechnol 18: 455-457; reviewed by Stemple (2004) Nat Rev Genet 5(2): 145-50).

### Homologous Recombination

[0129] Homologous recombination allows introduction in a genome of a selected nucleic acid at a defined selected position. Homologous recombination is a standard technology used routinely in biological sciences for lower organisms such as yeast or the moss Physcomitrella. Methods for performing homologous recombination in plants have been described not only for model plants (Offringa et al. (1990) EMBO J 9(10): 3077-84) but also for crop plants, for example rice (Terada et al. (2002) Nat Biotech 20(10): 1030-4; lida and Terada (2004) Curr Opin Biotech 15(2): 132-8), and approaches exist that are generally applicable regardless of the target organism (Miller et al, Nature Biotechnol. 25, 778-785, 2007).

### Yield Related Traits

[0130] Yield related traits are traits or features which are related to plant yield. Yield-related traits may comprise one or more of the following non-limitative list of features: early flowering time, yield, biomass, seed yield, early vigour, greenness index, increased growth rate, improved agronomic traits, such as e.g. improved Water Use Efficiency (WUE), improved Nitrogen Use Efficiency (NUE), etc.

### Yield

[0131] The term “yield” in general means a measurable produce of economic value, typically related to a specified crop, to an area, and to a period of time. Individual plant parts directly contribute to yield based on their number, size and/or weight, or the actual yield is the yield per square meter for a crop and year, which is determined by dividing total production (includes both harvested and appraised production) by planted square meters.

[0132] The terms “yield” of a plant and “plant yield” are used interchangeably herein and are meant to refer to vegetative biomass such as root and/or shoot biomass, to reproductive organs, and/or to propagules such as seeds of that plant.

[0133] Taking corn as an example, male inflorescences (tassels) and female inflorescences (ears). The female inflorescence produces pairs of spikelets on the surface of a central axis (cob). Each of the female spikelets encloses two fertile florests, one of whose will usually mature into a maize kernel once fertilized. Hence a yield increase in maize may be manifested as one or more of the following: increase in the number of plants established per square meter, an increase in the number of ears per plant, an increase in the number of rows, number of kernels per row, kernel weight, thousand kernel weight, ear length/diameter, increase in the seed filling rate, which is the number of filled florets (i.e. florets containing seed) divided by the total number of florets and multiplied by 100), among others.

[0134] Inflorescences in rice plants are called panicles. The panicle bears spikelets. The spikelet is the basic unit of the panicles and consists of a pedicel and a floret. The floret is born on the pedicel. A floret includes a flower that is covered by two protective glumes: a larger glume (the lemma) and a shorter glume (the palea). Hence, taking rice as an example, a yield increase may manifest itself as an increase in one or more of the following: number of plants per square meter, number of panicles per plant, panicle length, number of spikelets per panicle, number of flowers (or florets) per panicle, increase in the seed filling rate which is the number of filled florets (i.e. florets containing seeds divided by the total number of florets and multiplied by 100), increase in thousand kernel weight, among others. In rice, submergence tolerance may also result in increased yield.

### Early Flowering Time

[0135] Plants having an “early flowering time” as used herein are plants which start to flower earlier than control plants. Hence this term refers to plants that show an earlier start of flowering. Flowering time of plants can be assessed by counting the number of days (“time to flower”) between sowing and the emergence of a first inflorescence. The “flowering time” of a plant can for instance be determined using the method as described in WO 2007/093444.

### Early Vigour

[0136] “Early vigour” refers to active healthy well-balanced growth especially during early stages of plant growth, and may result from increased plant fitness due to, for example, the plants being better adapted to their environment (i.e. optimizing the use of energy resources and partitioning between shoot and root). Plants having early vigour also show increased seedling survival and a better establishment of the crop, which often results in highly uniform fields (with the crop growing in uniform manner, i.e. with the majority of plants reaching the various stages of development at substantially the same time), and often better and higher yield. Therefore, early vigour may be determined by measuring various factors, such as thousand kernel weight, percentage germination, percentage emergence, seedling growth, seedling height, root length, root and shoot biomass and many more.

### Increased Growth Rate

[0137] The increased growth rate may be specific to one or more parts of a plant (including seeds), or may be throughout substantially the whole plant. Plants having an increased growth rate may have a shorter life cycle. The life cycle of a plant may be taken to mean the time needed to grow from a dry mature seed up to the stage where the plant has produced dry mature seeds, similar to the starting material. This life cycle may be influenced by factors such as speed of germination, early vigour, growth rate, greenness index, flowering time and speed of seed maturation. The increase in growth rate may take place at one or more stages in the life cycle of a plant or during substantially the whole plant life cycle. Increased growth rate during the early stages in the life cycle of a plant may reflect enhanced vigour. The increase in growth rate may alter the harvest cycle of a plant allowing plants to be sown later and/or harvested sooner than would otherwise be possible (a similar effect may be obtained with earlier flowering time). If the growth rate is sufficiently increased, it may allow for the further sowing of seeds of the same plant species (for example sowing and harvesting of rice plants followed by sowing and harvesting of further rice plants all within one conventional growing period). Similarly, if the growth rate is sufficiently increased, it may allow for the further sowing of seeds of different plants species (for example the sowing and harvesting of corn plants followed by, for example, the sowing and optional harvesting of soybean, potato or any other suitable plant). Harvesting additional times from the same rootstock in the case of some crop plants may also be possible. Altering the harvest cycle of a plant may lead to an increase in annual biomass production per square meter (due to an increase in the number of times (say in a year) that any particular plant may be grown and harvested). An increase in growth rate may also allow for the cultivation of transgenic plants in a wider geographical area than their wild-type counterparts, since the territorial limitations for growing a crop are often determined by adverse environmental conditions either at the time of planting (early season) or at the time of harvesting (late season). Such adverse conditions may be avoided if the harvest cycle is shortened. The growth rate may be determined by deriving various parameters from growth curves, such parameters may be: T-Mid (the time taken for plants to reach 50% of their maximal size) and T-90 (time taken for plants to reach 90% of their maximal size), amongst others.

### Stress Resistance

[0138] An increase in yield and/or growth rate occurs whether the plant is under non-stress conditions or whether the plant is exposed to various stresses compared to control plants. Plants typically respond to exposure to stress by growing more slowly. In conditions of severe stress, the plant may even stop growing altogether. Mild stress on the other hand is defined herein as being any stress to which a plant is exposed which does not result in the plant ceasing to grow altogether without the capacity to resume growth. Mild stress in the sense of the invention leads to a reduction in the growth of the stressed plants of less than 40%, 35%, 30% or 25%, more preferably less than 20% or 15% in comparison to the control plant under non-stress conditions. Due to advances in agricultural practices (irrigation, fertilization, pesticide treatments) severe stresses are not often encountered in cultivated crop plants. As a consequence, the compromised growth induced by mild stress is often an undesirable feature for agriculture. “Mild stresses” are the everyday biotic and/or abiotic (environmental) stresses to which a plant is exposed. Abiotic stresses may be due to drought or excess water, anaerobic stress, salt stress, chemical toxicity, oxidative stress and hot, cold or freezing temperatures.

[0139] “Biotic stresses” are typically those stresses caused by pathogens, such as bacteria, viruses, fungi, nematodes and insects.

[0140] The “abiotic stress” may be an osmotic stress caused by a water stress, e.g. due to drought, salt stress, or freezing stress. Abiotic stress may also be an oxidative stress or a cold stress. “Freezing stress” is intended to refer to stress due to freezing temperatures, i.e. temperatures at which available water molecules freeze and turn into ice. “Cold stress”, also called “chilling stress”, is intended to refer to cold temperatures, e.g. temperatures below 10°, or preferably below 5° C., but at which water molecules do not freeze. As reported in Wang et al. (Planta (2003) 218: 1-14), abiotic stress leads to a series of morphological, physiological, biochemical and molecular changes that adversely affect plant growth and productivity. Drought, salinity, extreme temperatures and oxidative stress are known to be interconnected and may induce growth and cellular damage through similar mechanisms. Rabbani et al. (Plant Physiol (2003) 133: 1755-1767) describes a particularly high degree of “cross talk” between drought stress and high-salinity stress. For example, drought and/or salinisation are manifested primarily as osmotic stress, resulting in the disruption of homeostasis and ion distribution in the cell. Oxidative stress, which frequently accompanies high or low temperature, salinity or drought stress, may cause denaturing of functional and structural proteins. As a consequence, these diverse environmental stresses often activate similar cell signalling pathways and cellular responses, such as the production of stress proteins, up-regulation of anti-oxidants, accumulation of compatible solutes and growth arrest. The term “non-stress” conditions as used herein are those environmental conditions that allow optimal growth of plants. Persons skilled in the art are aware of normal soil conditions and climatic conditions for a given location. Plants with optimal growth conditions, (grown under non-stress conditions) typically yield in increasing order of preference at least 97%, 95%, 92%, 90%, 87%, 85%, 83%, 80%, 77% or 75% of the average production of such plant in a given environment. Average production may be calculated on harvest and/or season basis. Persons skilled in the art are aware of average yield productions of a crop.

[0141] In particular, the methods of the present invention may be performed under non-stress conditions. In an example, the methods of the present invention may be performed under non-stress conditions such as mild drought to give plants having increased yield relative to control plants.

[0142] In another embodiment, the methods of the present invention may be performed under stress conditions.

[0143] In an example, the methods of the present invention may be performed under stress conditions such as drought to give plants having increased yield relative to control plants. In another example, the methods of the present invention may be performed under stress conditions such as nutrient deficiency to give plants having increased yield relative to control plants.

[0144] Nutrient deficiency may result from a lack of nutrients such as nitrogen, phosphates and other phosphorous-containing compounds, potassium, calcium, magnesium, manganese, iron and boron, amongst others.

[0145] In yet another example, the methods of the present invention may be performed under stress conditions such as salt stress to give plants having increased yield relative to control plants. The term salt stress is not restricted to common salt (NaCl), but may be any one or more of: NaCl, KCl, LiCl, MgCl₂, CaCl₂, amongst others.

[0146] In yet another example, the methods of the present invention may be performed under stress conditions such as cold stress or freezing stress to give plants having increased yield relative to control plants.

### Increase/Improve/Enhance

[0147] The terms “increase”, “improve” or “enhance” are interchangeable and shall mean in the sense of the application at least a 3%, 4%, 5%, 6%, 7%, 8%, 9%, or 10%, preferably at least 15% or 20%, more preferably 25%, 30%, 35% or 40% more yield and/or growth in comparison to control plants as defined herein.

### Seed Yield

[0148] Increased seed yield may manifest itself as one or more of the following:
[0149] a) an increase in seed biomass (total seed weight) which may be on an individual seed basis and/or per plant and/or per square meter;
[0150] b) increased number of flowers per plant;
[0151] c) increased number of seeds;
[0152] d) increased seed filling rate (which is expressed as the ratio between the number of filled florets divided by the total number of florets);
[0153] e) increased harvest index, which is expressed as a ratio of the yield of harvestable parts, such as seeds, divided by the biomass of aboveground plant parts; and
[0154] f) increased thousand kernel weight (TKW), which is extrapolated from the number of seeds counted and their total weight. An increased TKW may result from an increased seed size and/or seed weight, and may also result from an increase in embryo and/or endosperm size.

[0155] An increase in seed yield may also be manifested as an increase in seed size and/or seed volume. Furthermore, an increase in seed yield may also manifest itself as an increase in seed area and/or seed length and/or seed width and/or seed perimeter.

### Greenness Index

[0156] The “greenness index” as used herein is calculated from digital images of plants. For each pixel belonging to the plant object on the image, the ratio of the green value versus the red value (in the RGB model for encoding color) is calculated. The greenness index is expressed as the percentage of pixels for which the green-to-red ratio exceeds a given threshold. Under normal growth conditions, under salt stress growth conditions, and under reduced nutrient availability growth conditions, the greenness index of plants is measured in the last imaging before flowering. In contrast, under drought stress growth conditions, the greenness index of plants is measured in the first imaging after drought.

### Biomass

[0157] The term “biomass” as used herein is intended to refer to the total weight of a plant. Within the definition of biomass, a distinction may be made between the biomass of one or more parts of a plant, which may include any one or more of the following:
[0158] aboveground parts such as but not limited to shoot biomass, seed biomass, leaf biomass, etc.;
[0159] aboveground harvestable parts such as but not limited to shoot biomass, seed biomass, leaf biomass, etc.:
[0160] parts below ground, such as but not limited to root biomass, etc.;
[0161] harvestable parts below ground, such as but not limited to root biomass, etc.;
[0162] vegetative biomass such as root biomass, shoot biomass, etc.;
[0163] reproductive organs; and
[0164] propagules such as seed.

### Marker Assisted Breeding

[0165] Such breeding programmes sometimes require introduction of allelic variation by mutagenic treatment of the plants, using for example EMS mutagenesis; alternatively, the programme may start with a collection of allelic variants of so called “natural” origin caused unintentionally. Identification of allelic variants then takes place, for example, by PCR. This is followed by a step for selection of superior allelic variants of the sequence in question and which give increased yield. Selection is typically carried out by monitoring growth performance of plants containing different allelic variants of the sequence in question. Growth performance may be monitored in a greenhouse or in the field. Further optional steps include crossing plants in which the superior allelic variant was identified with another plant. This could be used, for example, to make a combination of interesting phenotypic features.

### Use as Probes in (Gene Mapping)

[0166] Use of nucleic acids encoding the protein of interest for genetically and physically mapping the genes requires only a nucleic acid sequence of at least 15 nucleotides in length. These nucleic acids may be used as restriction fragment length polymorphism (RFLP) markers. Southern blots (Sambrook J, Fritsch E F and Maniatis T (1989) Molecular Cloning, A Laboratory Manual) of restriction-digested plant genomic DNA may be probed with the nucleic acids encoding the protein of interest. The resulting banding patterns may then be subjected to genetic analyses using computer programs such as MapMaker (Lander et al. (1987) Genomics 1: 174-181) in order to construct a genetic map. In addition, the nucleic acids may be used to probe Southern blots containing restriction endonuclease-treated genomic DNAs of a set of individuals representing parent and progeny of a defined genetic cross. Segregation of the DNA polymorphisms is noted and used to calculate the position of the nucleic acid encoding the protein of interest in the genetic map previously obtained using this population (Botstein et al. (1980) Am. J. Hum. Genet. 32:314-331).

[0167] The production and use of plant gene-derived probes for use in genetic mapping is described in Bernatzky and Tanksley (1986) Plant Mol. Biol. Reporter 4: 37-41. Numerous publications describe genetic mapping of specific cDNA clones using the methodology outlined above or variations thereof. For example, F2 intercross populations, backcross populations, randomly mated populations, near isogenic lines, and other sets of individuals may be used for mapping. Such methodologies are well known to those skilled in the art.

[0168] The nucleic acid probes may also be used for physical mapping (i.e., placement of sequences on physical maps; see Hoheisel et al. In: Non-mammalian Genomic Analysis: A Practical Guide, Academic press 1996, pp. 319-346, and references cited therein).

[0169] In another embodiment, the nucleic acid probes may be used in direct fluorescence in situ hybridisation (FISH) mapping (Trask (1991) Trends Genet. 7:149-154). Although current methods of FISH mapping favour use of large clones (several kb to several hundred kb; see Laan et al. (1995) Genome Res. 5:13-20), improvements in sensitivity may allow performance of FISH mapping using shorter probes.

[0170] A variety of nucleic acid amplification-based methods for genetic and physical mapping may be carried out using the nucleic acids. Examples include allele-specific amplification (Kazazian (1989) J. Lab. Clin. Med 11:95-96), polymorphism of PCR-amplified fragments (CAPS; Sheffield et al. (1993) Genomics 16:325-332), allele-specific ligation (Landegren et al. (1988) Science 241:1077-1080), nucleotide extension reactions (Sokolov (1990) Nucleic Acid Res. 18:3671), Radiation Hybrid Mapping (Walter et al. (1997) Nat. Genet. 7:22-28) and Happy Mapping (Dear and Cook (1989) Nucleic Acid Res. 17:6795-6807). For these methods, the sequence of a nucleic acid is used to design and produce primer pairs for use in the amplification reaction or in primer extension reactions. The design of such primers is well known to those skilled in the art. In methods employing PCR-based genetic mapping, it may be necessary to identify DNA sequence differences between the parents of the mapping cross in the region corresponding to the instant nucleic acid sequence. This, however, is generally not necessary for mapping methods.

### Plant

[0171] The term “plant” as used herein encompasses whole plants, ancestors and progeny of the plants and plant parts, including seeds, shoots, stems, leaves, roots (including tubers), flowers, and tissues and organs, wherein each of the aforementioned comprise the gene/nucleic acid of interest. The term “plant” also encompasses plant cells, suspension cultures, callus tissue, embryos, meristematic regions, gametophytes, sporophytes, pollen and microspores, again wherein each of the aforementioned comprises the gene/nucleic acid of interest.

[0172] Plants that are particularly useful in the methods of the invention include all plants which belong to the superfamily Viridiplantae, in particular monocotyledonous and dicotyledonous plants including fodder or forage legumes, ornamental plants, food crops, trees or shrubs selected from the list comprising Acer spp., Actinidia spp., Abelmoschus spp., Agave sisalana, Agropyron spp., Agrostis stolonifera, Allium spp., Amaranthus spp., Ammophila arenaria, Ananas comosus, Annona spp., Apium graveolens, Arachis spp, Artocarpus spp., Asparagus officinalis, Avena spp. (e.g. Avena sativa, Avena fatua, Avena byzantina, Avena fatua var. sativa, Avena hybrida), Averrhoa carambola, Bambusa sp., Benincasa hispida, Bertholletia excelsea, Beta vulgaris, Brassica spp. (e.g. Brassica napus, Brassica rapa ssp. [canola, oilseed rape, turnip rape]), Cadaba farinosa, Camellia sinensis, Canna indica, Cannabis sativa, Capsicum spp., Carex elata, Carica papaya, Carissa macrocarpa, Carya spp., Carthamus tinctorius, Castanea spp., Ceiba pentandra, Cichorium endivia, Cinnamomum spp., Citrullus lanatus, Citrus spp., Cocos spp., Coffea spp., Colocasia esculenta, Cola spp., Corchorus sp., Coriandrum sativum, Corylus spp., Crataegus spp., Crocus sativus, Cucurbita spp., Cucumis spp., Cynara spp., Daucus carota, Desmodium spp., Dimocarpus longan, Dioscorea spp., Diospyros spp., Echinochloa spp., Elaeis (e.g. Elaeis guineensis, Elaeis oleifera), Eleusine coracana, Eragrostis tef, Erianthus sp., Eriobotrya japonica, Eucalyptus sp., Eugenia uniflora, Fagopyrum spp., Fagus spp., Festuca arundinacea, Ficus carica, Fortunella spp., Fragaria spp., Ginkgo biloba, Glycine spp. (e.g. Glycine max, Soja hispida or Soja max), Gossypium hirsutum, Helianthus spp. (e.g. Helianthus annuus), Hemerocallis fulva, Hibiscus spp., Hordeum spp. (e.g. Hordeum vulgare), Ipomoea batatas, Juglans spp., Lactuca sativa, Lathyrus spp., Lens culinaris, Linum usitatissimum, Litchi chinensis, Lotus spp., Luffa acutangula, Lupinus spp., Luzula sylvatica, Lycopersicon spp. (e.g. Lycopersicon esculentum, Lycopersicon lycopersicum, Lycopersicon pyriforme), Macrotyloma spp., Malus spp., Malpighia emarginata, Mammea americana, Mangifera indica, Manihot spp., Manilkara zapota, Medicago sativa, Melilotus spp., Mentha spp., Miscanthus sinensis, Momordica spp., Morus nigra, Musa spp., Nicotiana spp., Olea spp., Opuntia spp., Ornithopus spp., Oryza spp. (e.g. Oryza sativa, Oryza latifolia), Panicum miliaceum, Panicum virgatum, Passiflora edulis, Pastinaca sativa, Pennisetum sp., Persea spp., Petroselinum crispum, Phalaris arundinacea, Phaseolus spp., Phleum pratense, Phoenix spp., Phragmites australis, Physalis spp., Pinus spp., Pistacia vera, Pisum spp., Poa spp., Populus spp., Prosopis spp., Prunus spp., Psidium spp., Punica granatum, Pyrus communis, Quercus spp., Raphanus sativus, Rheum rhabarbarum, Ribes spp., Ricinus communis, Rubus spp., Saccharum spp., Salix sp., Sambucus spp., Secale cereale, Sesamum spp., Sinapis sp., Solanum spp. (e.g. Solanum tuberosum, Solanum integrifolium or Solanum lycopersicum), Sorghum bicolor, Spinacia spp., Syzygium spp., Tagetes spp., Tamarindus indica, Theobroma cacao, Trifolium spp., Tripsacum dactyloides, Triticosecale rimpaui, Triticum spp. (e.g. Triticum aestivum, Triticum durum, Triticum turgidum, Triticum hybernum, Triticum macha, Triticum sativum, Triticum monococcum or Triticum vulgare), Tropaeolum minus, Tropaeolum majus, Vaccinium spp., Vicia spp., Vigna spp., Viola odorata, Vitis spp., Zea mays, Zizania palustris, Ziziphus spp., amongst others.

### Control Plant(s)

[0173] The choice of suitable control plants is a routine part of an experimental setup and may include corresponding wild type plants or corresponding plants without the gene of interest. The control plant is typically of the same plant species or even of the same variety as the plant to be assessed. The control plant may also be a nullizygote of the plant to be assessed. Nullizygotes are individuals missing the transgene by segregation. A “control plant” as used herein refers not only to whole plants, but also to plant parts, including seeds and seed parts.

### DETAILED DESCRIPTION OF THE INVENTION

[0174] Surprisingly, it has now been found that modulating expression in a plant of a nucleic acid encoding a GDH polypeptide gives plants having enhanced yield-related traits relative to control plants. According to a first embodiment, the present invention provides a method for enhancing yield-related traits in plants relative to control plants, comprising modulating expression in a plant of a nucleic acid encoding a GDH polypeptide and optionally selecting for plants having enhanced yield-related traits.

[0175] The invention also provides hitherto unknown GDH-encoding nucleic acids and GDH polypeptides. According to a further embodiment of the present invention, there is therefore provided an isolated nucleic acid molecule selected from:
[0176] (i) a nucleic acid represented by SEQ ID NO: 99;
[0177] (ii) the complement of a nucleic acid represented by SEQ ID NO: 99;
[0178] (iii) a nucleic acid encoding a GDH polypeptide having, in increasing order of preference, at least 50%, 55%, 60%, 65%, 70%, 75%, 80%, 85%, 90%, 95%, 96%, 97%, 98%, 99% or more sequence identity to the amino acid sequence represented by SEQ ID NO: 100, and having in increasing order of preference at least 50%, 55%, 60%, 65%, 70%, 75%, 80%, 85%, 90%, 95%, 96%, 97%, 98%, 99% or more sequence identity to any one of the motifs 1 to 6.

[0179] According to a further embodiment of the present invention, there is also provided an isolated polypeptide selected from:
[0180] (i) an amino acid sequence represented by SEQ ID NO: 176;
[0181] (ii) an amino acid sequence having, in increasing order of preference, at least 50%, 55%, 60%, 65%, 70%, 75%, 80%, 85%, 90%, 95%, 96%, 97%, 98%, 99% or more sequence identity to the amino acid sequence represented by SEQ ID NO: 176, and having in increasing order of preference at least 50%, 55%, 60%, 65%, 70%, 75%, 80%, 85%, 90%, 95%, 96%, 97%, 98%, 99% or more sequence identity to any one of the motifs 1 to 6;
[0182] (iii) derivatives of any of the amino acid sequences given in (i) or (ii) above.

[0183] Furthermore, it has now surprisingly been found that modulating expression in a plant of a nucleic acid encoding a FLA-like polypeptide gives plants having enhanced yield-related traits relative to control plants. According to a first embodiment, the present invention provides a method for enhancing yield-related traits in plants relative to control plants, comprising modulating expression in a plant of a nucleic acid encoding a FLA-like polypeptide and optionally selecting for plants having enhanced yield-related traits.

[0184] According to a further embodiment of the present invention, there is therefore provided an isolated nucleic acid molecule selected from:
[0185] (i) a nucleic acid represented by any one or more of the nucleic acids set forth in Table A2;
[0186] (ii) the complement of a nucleic acid of (i);
[0187] (iii) a nucleic acid encoding a FLA-like polypeptide having in increasing order of preference at least 50%, 51%, 52%, 53%, 54%, 55%, 56%, 57%, 58%, 59%, 60%, 61%, 62%, 63%, 64%, 65%, 66%, 67%, 68%, 69%, 70%, 71%, 72%, 73%, 74%, 75%, 76%, 77%, 78%, 79%, 80%, 81%, 82%, 83%, 84%, 85%, 86%, 87%, 88%, 89%, 90%, 91%, 92%, 93%, 94%, 95%, 96%, 97%, 98%, 99% or 100% sequence identity to the amino acid sequence represented by any of the polypeptide sequences of Table A2, and additionally or alternatively comprising one or more motifs having in increasing order of preference at least 50%, 55%, 60%, 65%, 70%, 75%, 80%, 85%, 90%, 95%, 96%, 97%, 98%, 99% or 100% sequence identity to any one or more of the domains and motifs sequence given in SEQ ID NO: 487 to SEQ ID NO: 497 and further preferably conferring enhanced yield-related traits relative to control plants.
[0188] (iv) a nucleic acid molecule which hybridizes with a nucleic acid molecule of (i) to (iii) under high stringency hybridization conditions and preferably confers enhanced yield-related traits relative to control plants.

[0189] According to a further embodiment of the present invention, there is also provided an isolated polypeptide selected from:
[0190] (i) any of the amino acid sequence selected from the group of the polypeptides set forth in Table A2;
[0191] (ii) an amino acid sequence having, in increasing order of preference, at least 50%, 51%, 52%, 53%, 54%, 55%, 56%, 57%, 58%, 59%, 60%, 61%, 62%, 63%, 64%, 65%, 66%, 67%, 68%, 69%, 70%, 71%, 72%, 73%, 74%, 75%, 76%, 77%, 78%, 79%, 80%, 81%, 82%, 83%, 84%, 85%, 86%, 87%, 88%, 89%, 90%, 91%, 92%, 93%, 94%, 95%, 96%, 97%, 98%, or 99% sequence identity to any one or more of the amino acid sequence of the polypeptides set forth in Table A2, and additionally or alternatively comprising one or more motifs having in increasing order of preference at least 50%, 55%, 60%, 65%, 70%, 75%, 80%, 85%, 90%, 95%, 96%, 97%, 98%, 99% or 100% sequence identity to any one or more of the motifs given in SEQ ID NO: 487 to SEQ ID NO: 497, and further preferably conferring enhanced yield-related traits relative to control plants;
[0192] (iii) derivatives of any of the amino acid sequences given in (i) or (ii) above.

[0193] Furthermore, it has now surprisingly been found that modulating expression in a plant of a nucleic acid encoding a SAUR polypeptide gives plants having enhanced yield-related traits relative to control plants. According to a first embodiment, the present invention provides a method for enhancing yield-related traits in plants relative to control plants, comprising modulating expression in a plant of a nucleic acid encoding a SAUR polypeptide and optionally selecting for plants having enhanced yield-related traits.

[0194] The invention also provides hitherto unknown SAUR-encoding nucleic acids and SAUR polypeptides useful for conferring enhanced yield-related traits in plants relative to control plants.

[0195] According to a further embodiment of the present invention, there is therefore provided an isolated nucleic acid molecule selected from:
[0196] (i) a nucleic acid represented by any one of the nucleic acids of Table A3;
[0197] (ii) the complement of a nucleic acid represented by (i);
[0198] (iii) a nucleic acid encoding a SAUR polypeptide having in increasing order of preference at least 50%, 51%, 52%, 53%, 54%, 55%, 56%, 57%, 58%, 59%, 60%, 61%, 62%, 63%, 64%, 65%, 66%, 67%, 68%, 69%, 70%, 71%, 72%, 73%, 74%, 75%, 76%, 77%, 78%, 79%, 80%, 81%, 82%, 83%, 84%, 85%, 86%, 87%, 88%, 89%, 90%, 91%, 92%, 93%, 94%, 95%, 96%, 97%, 98%, or 99% sequence identity to the amino acid sequence of any of the polypeptides of Table A3 and additionally or alternatively comprising one or more motifs having in increasing order of preference at least 50%, 55%, 60%, 65%, 70%, 75%, 80%, 85%, 90%, 95%, 96%, 97%, 98%, 99% or more sequence identity to any one or more of the motifs given in SEQ ID NO: 1155 to SEQ ID NO: 1160, and further preferably conferring enhanced yield-related traits relative to control plants.
[0199] (iv) a nucleic acid molecule which hybridizes with a nucleic acid molecule of (i) to (iii) under high stringency hybridization conditions and preferably confers enhanced yield-related traits relative to control plants.

[0200] According to a further embodiment of the present invention, there is also provided an isolated polypeptide selected from:
[0201] (i) an amino acid sequence represented by any one of the polypeptides of Table A3;
[0202] (ii) an amino acid sequence having, in increasing order of preference, at least 50%, 51%, 52%, 53%, 54%, 55%, 56%, 57%, 58%, 59%, 60%, 61%, 62%, 63%, 64%, 65%, 66%, 67%, 68%, 69%, 70%, 71%, 72%, 73%, 74%, 75%, 76%, 77%, 78%, 79%, 80%, 81%, 82%, 83%, 84%, 85%, 86%, 87%, 88%, 89%, 90%, 91%, 92%, 93%, 94%, 95%, 96%, 97%, 98%, or 99% sequence identity to the amino acid sequence of any one of the polypeptides of Table A3 and additionally or alternatively comprising one or more motifs having in increasing order of preference at least 50%, 55%, 60%, 65%, 70%, 75%, 80%, 85%, 90%, 95%, 96%, 97%, 98%, 99% or more sequence identity to any one or more of the motifs given in SEQ ID NO: 1155 to SEQ ID NO: 1160, and further preferably conferring enhanced yield-related traits relative to control plants;
[0203] (iii) derivatives of any of the amino acid sequences given in (i) or (ii) above.

[0204] Furthermore, it has now surprisingly been found that modulating expression in a plant of a nucleic acid encoding a SAUR polypeptide gives plants having enhanced yield-related traits relative to control plants. According to a first embodiment, the present invention provides a method for enhancing yield-related traits in plants relative to control plants, comprising modulating expression in a plant of a first nucleic acid encoding at least a SAUR polypeptide and a second nucleic acid encoding one or more SYNP polypeptides, or a nucleic acid encoding a protein fusion between at least a SAUR and one or more SYNP polypeptides wherein the first and second nucleic acids are comprised in a single nucleic acid molecule or in multiple, at least two, nucleic acid molecules and optionally selecting for plants having enhanced yield-related traits.

[0205] Furthermore, it has now surprisingly been found that modulating expression in a plant of a nucleic acid encoding a DHAR polypeptide gives plants having enhanced yield-related traits relative to control plants. According to a first embodiment, the present invention provides a method for enhancing yield-related traits in plants relative to control plants, comprising modulating expression in a plant of a nucleic acid encoding a DHAR polypeptide and optionally selecting for plants having enhanced yield-related traits.

[0206] The invention also provides hitherto unknown DHAR-encoding nucleic acids and DHAR polypeptides.

[0207] According to a further embodiment of the present invention, there is therefore provided an isolated nucleic acid molecule selected from:
[0208] (i) a nucleic acid represented by SEQ ID NO: 1997, SEQ ID NO: 2121 and SEQ ID NO: 2193;
[0209] (ii) the complement of a nucleic acid represented by SEQ ID NO: 1997, SEQ ID NO: 2121 and SEQ ID NO: 2193;
[0210] (iii) a nucleic acid encoding a DHAR polypeptide as represented by any one of SEQ ID NO: 1998, SEQ ID NO: 2122 and SEQ ID NO: 2194, preferably as a result of the degeneracy of the genetic code, said isolated nucleic acid can be derived from a polypeptide sequence as represented by any one of said SEQ IDs and further preferably confers enhanced yield related traits relative to control plants;
[0211] (iv) a nucleic acid having, in increasing order of preference, at least 50%, 55%, 60%, 65%, 70%, 75%, 80%, 85%, 90%, 95%, 96%, 97%, 98%, 99% or more sequence identity with any of the nucleic acid sequences of Table A5 and further preferably confers enhanced yield related traits relative to control plants;
[0212] (v) a nucleic acid molecule which hybridizes with a nucleic acid molecule of (i) to (iv) under stringent hybridization conditions and preferably confers enhanced yield related traits relative to control plants;
[0213] (vi) a nucleic acid encoding a DHAR polypeptide having in increasing order of preference at least 50%, 55%, 60%, 65%, 70%, 75%, 80%, 85%, 90%, 95%, 96%, 97%, 98%, 99% or more sequence identity to any one of SEQ ID NO: 1998, SEQ ID NO: 2122 and SEQ ID NO: 2194 and any of the other amino acid sequences in Table A5 and preferably confers enhanced yield related traits relative to control plants.

[0214] According to a further embodiment of the present invention, there is also provided an isolated polypeptide selected from:
[0215] (i) an amino acid sequence represented by of SEQ ID NO: 1998, SEQ ID NO: 2122 and SEQ ID NO: 2194;
[0216] (ii) an amino acid sequence having, in increasing order of preference, at least 50%, 55%, 60%, 65%, 70%, 75%, 80%, 85%, 90%, 95%, 96%, 97%, 98%, 99% or more sequence identity to the amino acid sequence represented by SEQ ID NO: 1998, SEQ ID NO: 2122 and SEQ ID NO: 2194, and having in increasing order of preference at least 50%, 55%, 60%, 65%, 70%, 75%, 80%, 85%, 90%, 95%, 96%, 97%, 98%, 99% or more sequence identity to of SEQ ID NO: 1998, SEQ ID NO: 2122 and SEQ ID NO: 2194;
[0217] (iii) derivatives of any of the amino acid sequences given in (i) or (ii) above.

[0218] A preferred method for modulating (preferably, increasing) expression of a nucleic acid encoding a GDH polypeptide is by introducing and expressing in a plant a nucleic acid encoding a GDH polypeptide. Another preferred method for modulating (preferably, increasing) expression of a nucleic acid encoding a FLA-like polypeptide is by introducing and expressing in a plant a nucleic acid encoding a FLA-like polypeptide. Yet another preferred method for modulating (preferably, increasing) expression of a nucleic acid encoding a SAUR polypeptide is by introducing and expressing in a plant a nucleic acid encoding a SAUR polypeptide. Another preferred method for modulating (preferably, increasing) expression of a nucleic acid encoding a SAUR and a SYNP polypeptide is by introducing and expressing in a plant a first nucleic acid encoding at least a SAUR polypeptide and a second nucleic acid encoding one or more SYNP polypeptides, or a nucleic acid encoding a protein fusion between at least a SAUR and one or more SYNP polypeptides, wherein the first and second nucleic acids are comprised in a single nucleic acid molecule or in multiple, at least two, nucleic acid molecules. Still another preferred method for modulating (preferably, increasing) expression of a nucleic acid encoding a DHAR polypeptide is by introducing and expressing in a plant a nucleic acid encoding a DHAR polypeptide.

[0219] In one embodiment a “protein useful in the methods of the invention” is taken to mean a GDH polypeptide as defined herein. Any reference hereinafter to a “nucleic acid useful in the methods of the invention” is taken to mean a nucleic acid capable of encoding such a GDH polypeptide. The nucleic acid to be introduced into a plant (and therefore useful in performing the methods of the invention) is any nucleic acid encoding the type of protein which will now be described, hereafter also named “GDH nucleic acid” or “GDH gene”.

[0220] A “GDH polypeptide” as defined herein refers to any polypeptide having glutamate dehydrogenase activity, preferably having NAD-dependent glutamate dehydrogenase activity (EC1.4.1.2). Typically, a GDH polypeptide useful in the methods of the present invention comprises a Glu/Phe/Leu/Val dehydrogenase, C-terminal domain (Pfam entry PF00208) and a Glu/Phe/Leu/Val dehydrogenase, dimerisation region (Pfam entry PF02812).

[0221] Preferably, the GDH polypeptide comprises one or more of the following motifs:

Motif 1, SEQ ID NO: 3:
L(L/M)IP(Y/F/L)RE(I/V)KVEC(T/S)(I/L)P(K/R)DDG
Motif 2, SEQ ID NO: 4:
EVNALAQLMTWK(T/S)AV
Motif 3, SEQ ID NO: 5:
PAPDMGT(N/G)(A/S/P)QTMAW(I/M)(L/F)DEYSKFHG(H/Y)
(T/S)PA(V/I)VTGKP
Motif 4, SEQ ID NO: 6:
CD(V/I)L(I/V/L)P(A/C)ALGGV
Motif 5, SEQ ID NO: 7:
LPD(I/V)(Y/F/L)AN(S/C/A)GGV(T/I/V)V(S/G)YFEWVQN
(I/T/K)QGF(M/P/R)W(D/E/N)E
Motif 6, SEQ ID NO: 8, in the C-terminal end:
RGW
Motif 7, SEQ ID NO: 9:
F(R/K)V(P/S/V)W(V/I/L/M/E)DD(R/K/S/N)G(E/V/Q/R/K)
(T/A/K/L/I/C)(H/C/R/Q)(V/I/F)N(R/K)G(F/W/Y)RV
(H/Q)(F/W)
Motif 8, SEQ ID NO: 10:
GP(C/Y/F)(R/K)GG(I/L/M)R(F/L)(H/R)
Motif 9, SEQ ID NO: 11:
GG(S/A)DF(D/N/E)PKG(K/R)(T/S)(D/E)
Motif 10, SEQ ID NO: 12:
VGX(R/K)E(M/I/L)GY(L/M)(L/F/Y)GQ(Y/W)(R/K)R(L/I)
wherein X in position 3 can be any amino acid,
preferably X is one of T, P, F, A, G
Motif 11, SEQ ID NO: 13:
P(A/G/S)(I/M/K)A(A/T/V/S)(G/A/N)AGGV
Motif 12, SEQ ID NO: 14:
YR(V/A)QH(N/D/S)(N/H)(A/V/S/H)(L/R)(G/L/M)P(F/Y/V)
KGG(I/L)
Motif 13, SEQ ID NO: 15:
LA(S/A)L(N/M)T(W/F)K
Motif 14, SEQ ID NO: 16:
(F/Y)GG(A/S)KGG(V/I)
Motif 15, SEQ ID NO: 17:
VTGKP(T/V/L)(W/Y/E)(L/E)(H/G)G(I/S)(V/L/D/H)GR
(D/E/T/Q)(K/S/A/E)A(G/T)G(R/L)G
Motif 16, SEQ ID NO: 18:
P(A/C)DV(F/L)IP(C/A)A(V/I/L)
Motif 17, SEQ ID NO: 19:
EAAN(G/S)(A/P)(L/T/V)TP
Motif 18, SEQ ID NO: 20:
LPD(L/I)(I/Y/L)(A/T/C/L)N(G/A)G(A/G)V(V/I/T)VS
(F/Y)FEW(V/L)(Q/K)N

[0222] More preferably, the GDH polypeptide comprises in increasing order of preference, at least 2, at least 3, at least 4, at least 5 of the motifs listed above. Most preferably, the GDH polypeptide has also one of the following motifs:

Motif 19, SEQ ID NO: 21:
MNAL(A/V)AT(N/S)R(N/S)F
or
Motif 20, SEQ ID NO: 22:
RIFCTVC(K/R)EYGRKHRRNPYGNEGSRNMQ

[0223] Alternatively or additionally, the homologue of a GDH protein has in increasing order of preference at least 25%, 26%, 27%, 28%, 29%, 30%, 31%, 32%, 33%, 34%, 35%, 36%, 37%, 38%, 39%, 40%, 41%, 42%, 43%, 44%, 45%, 46%, 47%, 48%, 49%, 50%, 51%, 52%, 53%, 54%, 55%, 56%, 57%, 58%, 59%, 60%, 61%, 62%, 63%, 64%, 65%, 66%, 67%, 68%, 69%, 70%, 71%, 72%, 73%, 74%, 75%, 76%, 77%, 78%, 79%, 80%, 81%, 82%, 83%, 84%, 85%, 86%, 87%, 88%, 89%, 90%, 91%, 92%, 93%, 94%, 95%, 96%, 97%, 98%, or 99% overall sequence identity to the amino acid represented by SEQ ID NO: 2, provided that the homologous protein comprises the conserved motifs as outlined above. The overall sequence identity is determined using a global alignment algorithm, such as the Needleman Wunsch algorithm in the program GAP (GCG Wisconsin Package, Accelrys), preferably with default parameters and preferably with sequences of mature proteins (i.e. without taking into account secretion signals or transit peptides). Compared to overall sequence identity, the sequence identity will generally be higher when only conserved domains or motifs are considered. Preferably the motifs in a GDH polypeptide have, in increasing order of preference, at least 70%, 71%, 72%, 73%, 74%, 75%, 76%, 77%, 78%, 79%, 80%, 81%, 82%, 83%, 84%, 85%, 86%, 87%, 88%, 89%, 90%, 91%, 92%, 93%, 94%, 95%, 96%, 97%, 98%, or 99% sequence identity to the motifs represented by SEQ ID NO: 3 to SEQ ID NO: 22 (Motifs 1 to 20).

[0224] Preferably, the polypeptide sequence which when used in the construction of a phylogenetic tree, such as the one depicted in FIG. 3, clusters with GDH polypeptides, preferably with class I GDH polypeptides or with moss GDH polypeptides related to class I, more preferably to group of beta subunit GDH polypeptides comprising the amino acid sequence represented by SEQ ID NO: 2 rather than with any other group. Several moss GDH sequences cluster with Class I GDH sequences (for example Physcomitrella patens 126976, SEQ ID NO: 77), and thus are equally useful in the methods of present invention.

[0225] In another embodiment a “protein useful in the methods of the invention” is taken to mean a FLA-like polypeptide as defined herein. Any reference hereinafter to a “nucleic acid useful in the methods of the invention” is taken to mean a nucleic acid capable of encoding such a FLA-like polypeptide. The nucleic acid to be introduced into a plant (and therefore useful in performing the methods of the invention) is any nucleic acid encoding the type of protein which will now be described, hereafter also named “FLA-like polypeptide nucleic acid” or “FLA-like polypeptide gene”.

[0226] A “FLA-Hike polypeptide” as defined herein refers to any Fasciclin-like arabinogalactan polypeptide which typically has the capability to be glycosylated in a cell.

[0227] A FLA-like polypeptide useful in the methods of the invention comprises in increasing order of preference one, two, three, four or more of the following:
[0228] (i) an AGP-like (arabinogalactan-like) glycosylation region; and
[0229] (ii) a fasciclin-like (FLA-like) domain

[0230] Fasciclin-like domain as refer herein means a protein domain present and conserved amongst FLA-like polypeptides originating from different organism represented by any one of the sequences as found in specialized databases for conserved proteins domains such as SMART (Schultz et al. (1998) Proc. Natl. Acad. Sci. USA 95, 5857-5864; Letunic et al. (2008) Nucleic Acids Res, doi:10.1093/nar/gkn808) having accession number Smart00554, or in pfam having the domain accession reference name “fasciclin” and accession number PF02469 (Finn et al. Nucleic Acids Research (2008) Database Issue 36:D281-D288; Pfam: the protein families database R. D. Finn (eds M. J. Dunn, L. B. Jorde, P. F. R. Little, S. Subramaniam) Genetics, Genomics, Proteomics and Bioinformatics, Section 6: Protein Families (2005) ISBN 978-0-470-84974-3). Other domain databases such as those integrated at Intepro (Hunter et al. 2009 Nucleic Acids Res. 37 (Database Issue):D224-228; Quevillon 2005 Nucleic Acids Res. 33 (Web Server issue):W116-W120) comprise further examples of amino acid sequences of Fasciclin-like domains. Methods to consult sequences of protein domain databases comprising the sequence of Fasciclin-like domains and methods to identify a FLA-like domain in a polypeptide are well known in the art. Further details on such methods are provided in the Examples section.

[0231] A preferred FLA-like polypeptide useful in the methods of the invention comprises at least one, two, three, or four fasciclin-like domains having in increasing order of preference at least 25%, 26%, 27%, 28%, 29%, 30%, 31%, 32%, 33%, 34%, 35%, 36%, 37%, 38%, 39%, 40%, 41%, 42%, 43%, 44%, 45%, 46%, 47%, 48%, 49%, 50%, 51%, 52%, 53%, 54%, 55%, 56%, 57%, 58%, 59%, 60%, 61%, 62%, 63%, 64%, 65%, 66%, 67%, 68%, 69%, 70%, 71%, 72%, 73%, 74%, 75%, 76%, 77%, 78%, 79%, 80%, 81%, 82%, 83%, 84%, 85%, 86%, 87%, 88%, 89%, 90%, 91%, 92%, 93%, 94%, 95%, 96%, 97%, 98%, or 99% sequence identity to the amino acid represented by:
[0232] (i) TITVCAVDNAGMSDLLSKQLSIYTIKNVLSFRVLLDYFDAKKLHQITNGTALAATM FQATGSATGSSGFVNITDLRGGKVGLSPADYNGPPPAKFVKSIAEIPYNISVIQIS TIL (SEQ ID NO: 487) which corresponds to the N-term FLA-like domain in SEQ ID NO: 172; or
[0233] (ii) VDGGVTIFCPRDDAMKKFLPKFKNLTAEGKQSLLEYHGIPIYQSISNLKSNNGD MNTLATDGAKKYAVVIQNDGEDVTIKTKIVTAKITATVVDKLPLAIYSLDKVL (SEQ ID NO: 488) which corresponds to the C-term FLA-like domain in SEQ ID NO: 2; or
[0234] (iii) to the amino acid sequence of any of the FLA-like domains as present in any of the polypeptides of Table A2.

[0235] Two highly conserved peptides have been identified in Fasciclin-like domains, the so called H1 and H2 regions (Johnson et al., Plant Physiol. (2003) 133 (4) 1911-1925).

[0236] A preferred FLA-like domain as present in a FLA-like polypeptide useful in the methods of the invention comprises any one or more of the following:
[0237] (i) An H1 region having in increasing order of preference at least 50%, 51%, 52%, 53%, 54%, 55%, 56%, 57%, 58%, 59%, 60%, 61%, 62%, 63%, 64%, 65%, 66%, 67%, 68%, 69%, 70%, 71%, 72%, 73%, 74%, 75%, 76%, 77%, 78%, 79%, 80%, 81%, 82%, 83%, 84%, 85%, 86%, 87%, 88%, 89%, 90%, 91%, 92%, 93%, 94%, 95%, 96%, 97%, 98%, 99% or 100% sequence identity to the amino acid ITVCAVDNAGM (SEQ ID NO: 491) or to the amino acid sequence GVTIFCPRDDAM (SEQ ID NO: 492) which represent the H1 region in the N-term and C-terminal FLA-like domains of SEQ ID NO: 172 respectively or to the consensus H1 sequence represented by [Ser/Thr]-[Val/Leu/Ile]-Phe-Ala-Pro-X-[Asp/Glu/Asn]-X-Ala (SEQ ID NO: 489) wherein X represents any amino acid;
[0238] (ii) An H2 region having in increasing order of preference at least 50%, 51%, 52%, 53%, 54%, 55%, 56%, 57%, 58%, 59%, 60%, 61%, 62%, 63%, 64%, 65%, 66%, 67%, 68%, 69%, 70%, 71%, 72%, 73%, 74%, 75%, 76%, 77%, 78%, 79%, 80%, 81%, 82%, 83%, 84%, 85%, 86%, 87%, 88%, 89%, 90%, 91%, 92%, 93%, 94%, 95%, 96%, 97%, 98%, 99% or 100% sequence identity to the amino acid: ISVIQISTIL (SEQ ID NO: 493) or to the amino acid sequence LAIYSLDK (SEQ ID NO: 494) which represent the H2 region in the N-term and C-terminal FLA-like domains of SEQ ID NO: 172 respectively, or to the consensus H2 sequence represented by [Val/Leu/Ile]-[Phe/Tyr/His/Gln]-X-[Val/Leu/Ile]-X-X-[Val/Leu/Ile]-[Val/Leu/Ile]-[Val/Leu/Ile]-Pro Ala (SEQ ID NO: 320) wherein X represents any amino acid.

[0239] The recent identification of a sos5 (salt overly sensitive) mutant in Arabidopsis with an amino acid substitution in the H2 region of FLA4 (Shi et al., 2003, Plant Cell. 2003 January; 15(1):19-32) indicates that this domain is important for FLA function. The junction region between the second fasciclin-like domain and the second AGP-like glycosylation region is very conserved in FLA-like polypeptides. This region encompasses a highly conserved Ser-348 in the proper function of SOS5. The sos5 mutant phenotypes clearly indicate a critical role for Ser-348.

[0240] The sugar residues typically found in glycosylated FLA-like polypeptides arabinooligosaccharides and large arabinoglactan polysaccharide chains. The presence of clustered, non-contiguous Proline residues, separated by Alanine or Serine residues in the proteins backbone in FLA-like polypeptide typically results in glycosylation with large arabinogalacta polysaccharide chains in a cellular environment. FLA1-like polypeptides contain N-glycosylation sites in the fasciclin domain and additional sites including O-glycosylation sites are present in other regions of the polypeptide. Typically glycosylation sites may be identified based on the presence of at least two non-contiguous Pro residues; for example, the sequence (A/S) P(A/S) P. In vivo, these regions are predicted to be hydroxyproline (HYP) glycosylated (Hyp-O-glycosylated) and are increasingly being referred to as “glycomodules”.

[0241] According to another embodiment FLA-like polypeptides useful in the methods of the invention typically have one or more AGP-like glycosylation regions comprising preferably a multiplicity of two, three or more of any one or more of the following motifs:

| (SEQ ID NO: 495) | |
|---|---|
| (i) | SPAD/E |
| (SEQ ID NO: 496) | |
| (ii) | SPPAPA |
| (SEQ ID NO: 497) | |
| (iii) | PAPAP |

[0242] According to another embodiment, in addition to any one or more of the domains, regions and motifs described above, a FLA-like polypeptide useful in the methods of the invention comprises Tyr-His dipeptides, which are usually fanked by [Leu/Val/Ile]-[Leu/Val/Ile] residues. These residues have been shown to play roles in integrin binding in animal cells.

[0243] According to another embodiment a preferred a FLA-like polypeptide useful in the methods of the invention comprises two FLA-like domains and any one of more of the following motifs:

| (SEQ ID NO: 495) | |
|---|---|
| (i) | SPAD/E |
| (SEQ ID NO: 496) | |
| (ii) | SPPAPA |
| (SEQ ID NO: 497) | |
| (iii) | PAPAP |

[0244] Additionally or alternatively, the homologue of a FLA-like protein useful in the methods of the invention has in increasing order of preference at least 25%, 26%, 27%, 28%, 29%, 30%, 31%, 32%, 33%, 34%, 35%, 36%, 37%, 38%, 39%, 40%, 41%, 42%, 43%, 44%, 45%, 46%, 47%, 48%, 49%, 50%, 51%, 52%, 53%, 54%, 55%, 56%, 57%, 58%, 59%, 60%, 61%, 62%, 63%, 64%, 65%, 66%, 67%, 68%, 69%, 70%, 71%, 72%, 73%, 74%, 75%, 76%, 77%, 78%, 79%, 80%, 81%, 82%, 83%, 84%, 85%, 86%, 87%, 88%, 89%, 90%, 91%, 92%, 93%, 94%, 95%, 96%, 97%, 98%, or 99% overall sequence identity to the amino acid represented by SEQ ID NO: 172, provided that the homologous protein comprises any one or more of the conserved domains, regions or motifs as outlined above. The overall sequence identity is determined using a global alignment algorithm, such as the Needleman Wunsch algorithm in the program GAP (GCG Wisconsin Package, Accelrys), preferably with default parameters and preferably with sequences of mature proteins (i.e. without taking into account secretion signals or transit peptides). Compared to overall sequence identity, the sequence identity will generally be higher when only conserved domains or motifs are considered. Preferably the motifs in a FLA-like polypeptide have, in increasing order of preference, at least 70%, 71%, 72%, 73%, 74%, 75%, 76%, 77%, 78%, 79%, 80%, 81%, 82%, 83%, 84%, 85%, 86%, 87%, 88%, 89%, 90%, 91%, 92%, 93%, 94%, 95%, 96%, 97%, 98%, or 99% sequence identity to any one or more of the domains and motifs represented by SEQ ID NO: 487 to SEQ ID NO: 497.

[0245] In another embodiment a “protein useful in the methods of the invention” is taken to mean a SAUR polypeptide as defined herein. Any reference hereinafter to a “nucleic acid useful in the methods of the invention” is taken to mean a nucleic acid capable of encoding such a SAUR polypeptide. The nucleic acid to be introduced into a plant (and therefore useful in performing the methods of the invention) is any nucleic acid encoding the type of protein which will now be described, hereafter also named “SAUR nucleic acid” or “SAUR gene”.

[0246] A “SAUR polypeptide” as defined herein refers to any polypeptide comprising an Auxin inducible domain. Auxin inducible domains are well known in the art as conserved protein domains present in auxin inducible proteins of plant origin. They are referred to as “Auxin inducible” or “Auxin responsive” in databases of conserved domains such as Pfam domains, where the domain is described under accession number PF02519 (Pfam 23.0 (10340 families; R. D. Finn eat al. Nucleic Acids Research (2008) Database Issue 36:D281-D288). The curation and HMM (hidden Markov model) building models for PF02519 as used in Pfam are described below:

Curation PF02519

| | |
|---|---|
| Seed source: | Pfam-B_1263 (release 5.4) |
| Author: | Bashton M, Bateman A |
| Number in seed: | 114 |
| Number in full: | 417 |
| Average length of the domain: | 62.9 aa |
| Average identity of full alignment: | 40% |
| Average coverage of the sequence | 44.16% |
| by the domain: | |

### HMM Information

### PF02519

| HMM build | ls model: hmmbuild -F HMM_Is SEED | | | | |
|---|---|---|---|---|---|
| commands: | hmmcalibrate --cpu 1 --seed 0 HMM_ls | | | | |
| | fs model: hmmbuild -f -F HMM_fs SEED | | | | |
| | hmmcalibrate --cpu 1 --seed 0 HMM_fs | | | | |
| | | ls | | fs | |
| Model details: | Parameter | Sequence | Domain | Sequence | Domain |
| | Gathering | 25.0 | 25.0 | 18.0 | 18.0 |
| | cut-off | | | | |
| | Trusted | 29.6 | 29.6 | 18.5 | 18.5 |
| | cut-off | | | | |
| | Noise cut-off | 23.8 | 23.8 | 15.0 | 15.0 |

| | |
|---|---|
| Model length: | 72 |
| Family (HMM) | 6 |
| version: | |

[0248] Proteins comprising Auxin inducible domains are involved in the response of plants and plant cells to the hormone auxin.

[0249] A preferred SAUR polypeptide useful for the methods of the invention comprises a conserved domain having in increasing order of preference at least 50%, 51%, 52%, 53%, 54%, 55%, 56%, 57%, 58%, 59%, 60%, 81%, 62%, 63%, 64%, 65%, 66%, 67%, 68%, 69%, 70%, 71%, 72%, 73%, 74%, 75%, 76%, 77%, 78%, 79%, 80%, 81%, 82%, 83%, 84%, 85%, 86%, 87%, 88%, 89%, 90%, 91%, 92%, 93%, 94%, 95%, 96%, 97%, 98%, 99% or 100% sequence identity represented by amino acids 1 to 95 of SEQ ID NO: 502 (Auxin inducible domain in SEQ ID NO: 2) ore to any Auxin inducible domain as present in any one or more of the polypeptides of Table A3 or Table A3(i).

[0250] In another preferred embodiment the SAUR polypeptide useful for the methods of the invention comprises a motif having in increasing order of preference at least 1, 2, 3, 4, 5, 6, 7, 8, 8, 10, up to the maximum number of amino acid residues of the motif, amino acid sequence identity any one or more of the following conserved motifs:
[0251] (i) Motif 23: LAVYVGEMMQKRRFVVPVTYLSHPCFQKLLRKAEEEFGFDHPMGGL TIPC (SEQ ID NO: 1155) (corresponds to Motif 23 of SEQ ID NO: 502);
[0252] (ii) Motif 24: KHxxGVYTAEKxxYxxxIxxxxxxxxxAxxxxSxxxYxxxxPMPIx LxxC (SEQ ID NO: 1156) (corresponds to the conserved sequence of a motif equivalent to Motif 23 as found in SAUR polypeptides);
[0253] (iii) Motif 25: LQSSKQLLKSLSHSSNNVAIP (SEQ ID NO: 1157) (corresponds to Motif 2 of SEQ ID NO: 502);
[0254] (iv) Motif 26: VxxxKIAxKSQ (SEQ ID NO: 1158) (corresponds to the conserved sequence of a motif equivalent to Motif 25 as found in SAUR polypeptides);
[0255] (v) Motif 27: EQIFIDLASRL (SEQ ID NO: 1159) (corresponds to Motif 27 of SEQ ID NO: 502);
[0256] (vi) Motif 28: VExxxVxxxxL (SEQ ID NO: 1160) (corresponds to the conserved sequence of a motif equivalent to Motif 27 as found in SAUR polypeptides);
   Wherein X represents any amino acid.

[0257] Motifs 23 to 28 are relevant to the auxin response function of SAUR polypeptides.

[0258] Motifs 23 to 28 were identified using the MEME algorithm with a sub-set of polypeptide sequences of Table A3 or A3(i). Methods to identify conserved motifs are well known in the art, for example, The MEME algorithm (Bailey and Elkan, Proceedings of the Second International Conference on Intelligent Systems for Molecular Biology, pp. 28-36, AAAI Press, Menlo Park, Calif., 1994.)

[0259] More preferably, the SAUR polypeptide comprises in increasing order of preference, at least 2, at least 3, at least 4, at least 5, or all 6 motifs above described.

[0260] Further preferred SAUR polypeptides useful in the methods of the invention are encoded by Small Auxin Up RNAs of organisms of the viridiplantae kingdom. Small Auxin Up RNAs as well as methods to identify the same have been previously described and are well known in the art (Jain 2006; Hagen and Guilfoyle 2002).

[0261] Additionally or alternatively, SAUR polypeptides useful in the methods of the invention refer to a homologue of a SAUR protein. A preferred homologue of a SAUR protein has in increasing order of preference at least 25%, 26%, 27%, 28%, 29%, 30%, 31%, 32%, 33%, 34%, 35%, 36%, 37%, 38%, 39%, 40%, 41%, 42%, 43%, 44%, 45%, 46%, 47%, 48%, 49%, 50%, 51%, 52%, 53%, 54%, 55%, 56%, 57%, 58%, 59%, 60%, 61%, 62%, 63%, 64%, 65%, 66%, 67%, 68%, 69%, 70%, 71%, 72%, 73%, 74%, 75%, 76%, 77%, 78%, 79%, 80%, 81%, 82%, 83%, 84%, 85%, 86%, 87%, 88%, 89%, 90%, 91%, 92%, 93%, 94%, 95%, 96%, 97%, 98%, or 99% overall sequence identity to the amino acid represented by any one of the polypeptides of Table A3 or A3(i), more preferably by SEQ ID NO: 502, The overall sequence identity is determined using a global alignment algorithm, such as the Needleman Wunsch algorithm in the program GAP (GCG Wisconsin Package, Accelrys), preferably with default parameters and preferably with sequences of mature proteins (i.e. without taking into account secretion signals or transit peptides). Compared to overall sequence identity, the sequence identity will generally be higher when only conserved domains or motifs are considered. Preferably the motifs in a SAUR polypeptide have, in increasing order of preference, at least 70%, 71%, 72%, 73%, 74%, 75%, 76%, 77%, 78%, 79%, 80%, 81%, 82%, 83%, 84%, 85%, 86%, 87%, 88%, 89%, 90%, 91%, 92%, 93%, 94%, 95%, 96%, 97%, 98%, or 99% sequence identity to any one or more of the motifs represented by SEQ ID NO: 1155 to SEQ ID NO: 1160 (Motifs 23 to 28).

[0262] In a further embodiment of the present invention, there is provided a SAUR polypeptide useful in the methods of the invention having in increasing order of preference at least 50%, 51%, 52%, 53%, 54%, 55%, 56%, 57%, 58%, 59%, 60%, 61%, 62%, 63%, 64%, 65%, 66%, 67%, 68%, 69%, 70%, 71%, 72%, 73%, 74%, 75%, 76%, 77%, 78%, 79%, 80%, 81%, 82%, 83%, 84%, 85%, 86%, 87%, 88%, 89%, 90%, 91%, 92%, 93%, 94%, 95%, 96%, 97%, 98%, 99% or 100% sequence identity to the SAUR polypeptide represented by SEQ ID NO: X or to any of the SAUR polypeptide sequences listed in Table A3(i). The SAUR polypeptide represented by SEQ ID NO: X and the SAUR polypeptide sequences listed in Table A3(i) are examples of SAUR33-like polypeptides.

[0263] Further preferably, SAUR33-like polypeptides comprise the following Motifs I and II and optionally also one or both of Motifs III and IV or any sequence having in increasing order of preference at least 50%, 51%, 52%, 53%, 54%, 55%, 56%, 57%, 58%, 59%, 60%, 61%, 62%, 63%, 64%, 65%, 66%, 67%, 68%, 69%, 70%, 71%, 72%, 73%, 74%, 75%, 76%, 77%, 78%, 79%, 80%, 81%, 82%, 83%, 84%, 85%, 86%, 87%, 88%, 89%, 90%, 91%, 92%, 93%, 94%, 95%, 96%, 97%, 98%, 99% or 100% sequence identity to Motifs I to IV.

Motif 47
(SEQ ID NO: 2284)
CEVVLFEHLLWMLENADPQ
Motif 48
(SEQ ID NO: 2285)
PESLDELVEYYAC
Motif 49
(SEQ ID NO: 2286)
GLSKLRCMIRRWHSSSRI
Motif 50
(SEQ ID NO: 2287)
SFHGADEVPKGLHPVYVGKSRRRYLIAEELVGHPLFQNLVDRT

[0264] The invention also provides hitherto unknown SAUR-encoding nucleic acids and SAUR polypeptides useful for conferring enhanced yield-related traits in plants relative to control plants.

[0265] According to a further embodiment of the present invention, there is therefore provided an isolated nucleic acid molecule selected from:
[0266] (i) a nucleic acid represented by any one of the nucleic acids of Table A3 or A3(i);
[0267] (ii) the complement of a nucleic acid represented by (i);
[0268] (iii) a nucleic acid encoding a SAUR polypeptide having in increasing order of preference at least 50%, 51%, 52%, 53%, 54%, 55%, 56%, 57%, 58%, 59%, 60%, 61%, 62%, 63%, 64%, 65%, 66%, 67%, 68%, 69%, 70%, 71%, 72%, 73%, 74%, 75%, 76%, 77%, 78%, 79%, 80%, 81%, 82%, 83%, 84%, 85%, 86%, 87%, 88%, 89%, 90%, 91%, 92%, 93%, 94%, 95%, 96%, 97%, 98%, or 99% sequence identity to the amino acid sequence of any of the polypeptides of Table A3 or A3(i) and additionally or alternatively comprising one or more motifs having in increasing order of preference at least 50%, 55%, 60%, 65%, 70%, 75%, 80%, 85%, 90%, 95%, 96%, 97%, 98%, 99% or more sequence identity to any one or more of the motifs given in SEQ ID NO: 1155 to SEQ ID NO: 1160, and further preferably conferring enhanced yield-related traits relative to control plants.
[0269] (iv) a nucleic acid molecule which hybridizes with a nucleic acid molecule of (i) to (iii) under high stringency hybridization conditions and preferably confers enhanced yield-related traits relative to control plants.

[0270] According to a further embodiment of the present invention, there is also provided an isolated polypeptide selected from:
[0271] (i) an amino acid sequence represented by any one of the polypeptides of Table A3 or A3(i);
[0272] (ii) an amino acid sequence having, in increasing order of preference, at least 50%, 51%, 52%, 53%, 54%, 55%, 56%, 57%, 58%, 59%, 60%, 61%, 62%, 63%, 64%, 65%, 66%, 67%, 68%, 69%, 70%, 71%, 72%, 73%, 74%, 75%, 76%, 77%, 78%, 79%, 80%, 81%, 82%, 83%, 84%, 85%, 86%, 87%, 88%, 89%, 90%, 91%, 92%, 93%, 94%, 95%, 96%, 97%, 98%, or 99% sequence identity to the amino acid sequence of any one of the polypeptides of Table A3 or A3(i) and additionally or alternatively comprising one or more motifs having in increasing order of preference at least 50%, 55%, 60%, 65%, 70%, 75%, 80%, 85%, 90%, 95%, 96%, 97%, 98%, 99% or more sequence identity to any one or more of the motifs given in SEQ ID NO: 1155 to SEQ ID NO: 1160, and further preferably conferring enhanced yield-related traits relative to control plants;
[0273] (iii) derivatives of any of the amino acid sequences given in (i) or (ii) above.

[0274] In another embodiment a “protein useful in the methods of the invention” is taken to mean any one or more polypeptides selected from the group of a SAUR polypeptide as defined herein, a SYNP polypeptide as defined herein and/or a protein fusion between at least one SAUR and one or more SYNP polypeptides. Any reference hereinafter to a “nucleic acid useful in the methods of the invention” is taken to mean any one or more nucleic acids selected from the group of a capable of encoding such a SAUR, a SYNP or a fusion thereof. The nucleic acid to be introduced into a plant (and therefore useful in performing the methods of the invention) is any nucleic acid encoding the type of protein which will now be described, hereafter also named “SAUR nucleic acid” or “SAUR gene”, or “SYNP nucleic acid” or “SYNP gene” or “SAUR-SYNP fusion nucleic acid” or “SAUR-SYNP fusion gene”.

### Concerning SAUR Polypeptides

[0275] A “SAUR polypeptide” as defined herein refers to any polypeptide comprising an Auxin inducible domain. Auxin inducible domains are well known in the art as conserved protein domains present in auxin inducible proteins of plant origin. They are referred to as “.Auxin inducible” or “Auxin responsive” in databases of conserved domains such as Pfam domains, where the domain is described under accession number PF02519 (Pfam 23.0 (10340 families; R. D. Finn eat al. Nucleic Acids Research (2008) Database Issue 36:D281-D288). The curation and HMM (hidden Markov model) building models for PF02519 as used in Pfam are described below:

Curation PF02519

| | |
|---|---|
| Seed source: | Pfam-B_1263 (release 5.4) |
| Author: | Bashton M, Bateman A |
| Number in seed: | 114 |
| Number in full: | 417 |
| Average length of the domain: | 62.9 aa |
| Average identity of full alignment: | 40% |
| Average coverage of the sequence by | 44.16% |
| the domain: | |

HMM information

### PF02519

| HMM build | ls model: hmmbuild -F HMM_ls SEED | | | | |
|---|---|---|---|---|---|
| commands: | hmmcalibrate --cpu 1 --seed 0 HMM_ls | | | | |
| | fs model: hmmbuild -f -F HMM_fs SEED | | | | |
| | hmmcalibrate --cpu 1 --seed 0 HMM_fs | | | | |
| | | ls | | fs | |
| Model details: | Parameter | Sequence | Domain | Sequence | Domain |
| | Gathering | 25.0 | 25.0 | 18.0 | 18.0 |
| | cut-off | | | | |
| | Trusted | 29.6 | 29.6 | 18.5 | 18.5 |
| | cut-off | | | | |
| | Noise cut-off | 23.8 | 23.8 | 15.0 | 15.0 |

| | |
|---|---|
| Model length: | 72 |
| Family (HMM) | 6 |
| version: | |

[0277] Proteins comprising Auxin inducible domains are involved in the response of plants and plant cells to the hormone auxin.

[0278] A preferred SAUR polypeptide useful for the methods of the invention comprises a conserved domain having in increasing order of preference at least 50%, 51%, 52%, 53%, 54%, 55%, 56%, 57%, 58%, 59%, 60%, 61%, 62%, 63%, 64%, 65%, 66%, 67%, 68%, 69%, 70%, 71%, 72%, 73%, 74%, 75%, 76%, 77%, 78%, 79%, 80%, 81%, 82%, 83%, 84%, 85%, 86%, 87%, 88%, 89%, 90%, 91%, 92%, 93%, 94%, 95%, 96%, 97%, 98%, 99% or 100% sequence identity represented by amino acids 1 to 95 of SEQ ID NO: 1164. (Auxin inducible domain in SEQ ID NO: 1164) or to any Auxin inducible domain as present in any one or more of the polypeptides of Table A3 and A3(i).

[0279] In another preferred embodiment the SAUR polypeptide useful for the methods of the invention comprises a motif having in increasing order of preference at least 1, 2, 3, 4, 5, 6, 7, 8, 9, 10, up to the maximum number of amino acid residues of the motif, amino acid sequence identity any one or more of the following conserved motifs:
[0280] (i) Motif 29: LAVYVGEMMQKRRFVVPVTYLSHPCFQKLLRKAEEEFGFDHPMGGLTI PC (SEQ ID NO: 1817) (corresponds to Motif 29 of SEQ ID NO: 1164);
[0281] (ii) Motif 30: KHxxGVYTAEKxxYxxxIxxxxxxxxxAxxxxS xxxYxxxxPMPIx LxxC (SEQ ID NO: 1818) (corresponds to the conserved sequence of a motif equivalent to Motif 29 as found in SAUR polypeptides);
[0282] (iii) Motif 31: LQSSKQLLKSLSHSSNNVAIP (SEQ ID NO: 1819) (corresponds to Motif 30 of SEQ ID NO: 1164);
[0283] (iv) Motif 32: VxxxKIAxKSQ (SEQ ID NO: 1820) (corresponds to the conserved sequence of a motif equivalent to Motif 31 as found in SAUR polypeptides);
[0284] (v) Motif 33: EQIFIDLASRL (SEQ ID NO: 1821) (corresponds to Motif 33 of SEQ ID NO: 1164);
[0285] (vi) Motif 34: VExxxVxxxxL (SEQ ID NO: 1822) (corresponds to the conserved sequence of a motif equivalent to Motif 34 as found in SAUR polypeptides);
   Wherein X represents any amino acid.

[0286] Motifs 29 to 34 are relevant to the auxin response function of SAUR polypeptides.

[0287] Motifs 29 to 34 were identified using the MEME algorithm with a sub-set of polypeptide sequences of Table A3. Methods to identify conserved motifs are well known in the art, for example, The MEME algorithm (Bailey and Elkan, Proceedings of the Second International Conference on Intelligent Systems for Molecular Biology, pp. 28-36, AAAI Press, Menlo Park, Calif., 1994.)

[0288] More preferably, the SAUR polypeptide comprises in increasing order of preference, at least 2, at least 3, at least 4, at least 5, or all 6 motifs above described.

[0289] Further preferred SAUR polypeptides useful in the methods of the invention are encoded by Small Auxin Up RNAs of organisms of the viridiplantae kingdom. Small Auxin Up RNAs as well as methods to identify the same have been previously described and are well known in the art (Jain 2006; Hagen and Guilfoyle 2002).

[0290] Additionally or alternatively, SAUR polypeptides useful in the methods of the invention refer to a homologue of a SAUR protein. A preferred homologue of a SAUR protein has in increasing order of preference at least 25%, 26%, 27%, 28%, 29%, 30%, 31%, 32%, 33%, 34%, 35%, 36%, 37%, 38%, 39%, 40%, 41%, 42%, 43%, 44%, 45%, 46%, 47%, 48%, 49%, 50%, 51%, 52%, 53%, 54%, 55%, 56%, 57%, 58%, 59%, 60%, 61%, 62%, 63%, 64%, 65%, 66%, 67%, 68%, 69%, 70%, 71%, 72%, 73%, 74%, 75%, 76%, 77%, 78%, 79%, 80%, 81%, 82%, 83%, 84%, 85%, 86%, 87%, 88%, 89%, 90%, 91%, 92%, 93%, 94%, 95%, 96%, 97%, 98%, or 99% overall sequence identity to the amino acid represented by any one of the polypeptides of Table A3 and A3(i), more preferably by SEQ ID NO: 1164, The overall sequence identity is determined using a global alignment algorithm, such as the Needleman Wunsch algorithm in the program GAP (GCG Wisconsin Package, Accelrys), preferably with default parameters and preferably with sequences of mature proteins (i.e. without taking into account secretion signals or transit peptides). Compared to overall sequence identity, the sequence identity will generally be higher when only conserved domains or motifs are considered. Preferably the motifs in a SAUR polypeptide have, in increasing order of preference, at least 70%, 71%, 72%, 73%, 74%, 75%, 76%, 77%, 78%, 79%, 80%, 81%, 82%, 83%, 84%, 85%, 86%, 87%, 88%, 89%, 90%, 91%, 92%, 93%, 94%, 95%, 96%, 97%, 98%, or 99% sequence identity to any one or more of the motifs represented by SEQ ID NO: 1817 to SEQ ID NO: 1822 (Motifs 29 to 34).

[0291] In a further embodiment of the present invention, there is provided a SAUR polypeptide useful in the methods of the invention having in increasing order of preference at least 50%, 51%, 52%, 53%, 54%, 55%, 56%, 57%, 58%, 59%, 60%, 61%, 62%, 63%, 64%, 65%, 66%, 67%, 68%, 69%, 70%, 71%, 72%, 73%, 74%, 75%, 76%, 77%, 78%, 79%, 80%, 81%, 82%, 83%, 84%, 85%, 86%, 87%, 88%, 89%, 90%, 91%, 92%, 93%, 94%, 95%, 96%, 97%, 98%, 99% or 100% sequence identity to the SAUR polypeptide represented by SEQ ID NO: X or to any of the SAUR polypeptide sequences listed in Table A3(i). The SAUR polypeptide represented by SEQ ID NO: X and the SAUR polypeptide sequences listed in Table A3(i) are examples of SAUR33-like polypeptides.

[0292] Further preferably, SAUR33-like polypeptides comprise the following Motifs I and II and optionally also one or both of Motifs III and IV or any sequence having in increasing order of preference at least 50%, 51%, 52%, 53%, 54%, 55%, 56%, 57%, 58%, 59%, 60%, 61%, 62%, 63%, 64%, 65%, 66%, 67%, 68%, 69%, 70%, 71%, 72%, 73%, 74%, 75%, 76%, 77%, 78%, 79%, 80%, 81%, 82%, 83%, 84%, 85%, 86%, 87%, 88%, 89%, 90%, 91%, 92%, 93%, 94%, 95%, 96%, 97%, 98%, 99% or 100% sequence identity to Motifs 47 to 50.

Motif 47
(SEQ ID NO: 2284)
CEVVLFEHLLWMLENADPQ
Motif 48
(SEQ ID NO: 2285)
PESLDELVEYYAC
Motif 49
(SEQ ID NO: 2286)
GLSKLRCMIRRWHSSSRI
Motif 50
(SEQ ID NO: 2287)
SFHGADEVPKGLHPVYVGKSRRRYLIAEELVGHPLFQNLVDRT

### Concerning SYNP Polypeptides

[0293] A “SYNP (SAUR yield network protein) polypeptide” as defined herein refers to any polypeptide functioning in the same biological network as a SAUR protein modulating yield traits of a plant.

[0294] The “SYNP polypeptide” as defined herein preferably refers to a protein having one or more pfam domain having in increasing order of preference at least 25%, 26%, 27%, 28%, 29%, 30%, 31%, 32%, 33%, 34%, 35%, 36%, 37%, 38%, 39%, 40%, 41%, 42%, 43%, 44%, 45%, 46%, 47%, 48%, 49%, 50%, 51%, 52%, 53%, 54%, 55%, 56%, 57%, 58%, 59%, 60%, 61%, 62%, 63%, 64%, 65%, 66%, 67%, 68%, 69%, 70%, 71%, 72%, 73%, 74%, 75%, 76%, 77%, 78%, 79%, 80%, 81%, 82%, 83%, 84%, 85%, 86%, 87%, 88%, 89%, 90%, 91%, 92%, 93%, 94%, 95%, 96%, 97%, 98%, 99% or 100% sequence identity to the amino acid of a pfam domain selected from the group of pfam domains present in any of the polypeptides of Table E and Table F.

[0295] Methods to identify pfam domain in a polypeptide are well known in the art and examples of the same are provided herein.

[0296] Further preferably the “SYNP polypeptide” as defined herein refers to a protein having in increasing order of preference at least 25%, 26%, 27%, 28%, 29%, 30%, 31%, 32%, 33%, 34%, 35%, 36%, 37%, 38%, 39%, 40%, 41%, 42%, 43%, 44%, 45%, 46%, 47%, 48%, 49%, 50%, 51%, 52%, 53%, 54%, 55%, 56%, 57%, 58%, 59%, 60%, 61%, 62%, 63%, 64%, 65%, 66%, 67%, 68%, 69%, 70%, 71%, 72%, 73%, 74%, 75%, 76%, 77%, 78%, 79%, 80%, 81%, 82%, 83%, 84%, 85%, 86%, 87%, 88%, 89%, 90%, 91%, 92%, 93%, 94%, 95%, 96%, 97%, 98%, 99% or 100% overall sequence identity to the amino acid represented by any one of the polypeptides of Table E and Table F.

[0297] In another embodiment a “protein useful in the methods of the invention” is taken to mean a DHAR polypeptide as defined herein. Any reference hereinafter to a “nucleic acid useful in the methods of the invention” is taken to mean a nucleic acid capable of encoding such a DHAR polypeptide. The nucleic acid to be introduced into a plant (and therefore useful in performing the methods of the invention) is any nucleic acid encoding the type of protein which will now be described, hereafter also named “DHAR nucleic acid” or “DHAR gene”.

[0298] A “DHAR polypeptide” as defined herein refers to any polypeptide comprising at least a dehydroascorbate reductase domain with an accession number PTHR11260:SF15 (HMMPanther Database). Proteins comprising DHAR polypeptide are involved in regeneration of ascorbic acid from oxidized ascorbate in the ascorbate-glutathione cycle. DHAR polypeptides typically belong to Enzyme Classification Number EC 1.8.5.1.

[0299] Preferably, the DHAR domain of an DHAR polypeptide has at least, in increasing order of preference, 49%, 50%, 51%, 52%, 53%, 54%, 55%, 56%, 57%, 58%, 59%, 60%, 61%, 62%, 63%, 64%, 65%, 66%, 67%, 68%, 69%, 70%, 71%, 72%, 73%, 74%, 75%, 76%, 77%, 78%, 79%, 80%, 81%, 82%, 83%, 84%, 85%, 86%, 87%, 88%, 89%, 90%, 91%, 92%, 93%, 94%, 95%, 96%, 97%, 98%, or 99% or more sequence identity to the sequence located between amino acid 19 and 210 of SEQ ID NO 1958.

[0300] Additionally or alternatively, the DHAR polypeptide useful in the methods of the invention comprises one or more sequence motifs having at least, in increasing order of preference 49%, 50%, 51%, 52%, 53%, 54%, 55%, 56%, 57%, 58%, 59%, 60%, 61%, 62%, 63%, 64%, 65%, 66%, 67%, 68%, 69%, 70%, 71%, 72%, 73%, 74%, 75%, 76%, 77%, 78%, 79%, 80%, 81%, 82%, 83%, 84%, 85%, 86%, 87%, 88%, 89%, 90%, 91%, 92%, 93%, 94%, 95%, 96%, 97%, 98%, or 99% or more sequence identity to any one or more of motifs 35 to 37:

[0301] The amino acids indicated herein in square brackets represent alternative amino acids for a particular position.

Motif 35:
(SEQ ID NO: 2239)
P[DN]KLGDCPF[SC]QRVLLTLEEK[KH][VL]PY[KD][ML][KH]
L[IV]
Motif 36:
(SEQ ID NO: 2240)
D[DEG]KW[VI][PAS]DSDVI[TV][QG][IL][LI]EEK[YF]PEP
[SP]L[VA]TPPE
Motif 37:
(SEQ ID NO: 2241)
P[FY][IV][NA]GE[KN][IV][ST]A[VA]DLSL[AG]PKLYHLE[V
I]ALGH[FY]K[KN]W[ST][VI]P

[0302] Motifs 35 to 37 are typically found in any DHAR polypeptide of any origin.

[0303] In another preferred embodiment of the present invention the DHAR polypeptide of the invention may comprise Motifs 38, 39 and 40 in addition to Motif 35, Motif 36 and Motif 37 as defined above, or may comprise a motif having, in increasing order of preference at least 49%, 50%, 51%, 52%, 53%, 54%, 55%, 56%, 57%, 58%, 59%, 60%, 61%, 62%, 63%, 64%, 65%, 66%, 67%, 68%, 69%, 70%, 71%, 72%, 73%, 74%, 75%, 76%, 77%, 78%, 79%, 80%, 81%, 82%, 83%, 84%, 85%, 86%, 87%, 88%, 89%, 90%, 91%, 92%, 93%, 94%, 95%, 96%, 97%, 98%, or 99% or more sequence identity to any one or more of Motifs 38 to 40:

Motif 38:
(SEQ ID NO: 2242)
E[VI]CVKA[AS]V[GT]AP[DN][KV]LGDCPF[SC]QRVLLTLEE
Motif 39:
(SEQ ID NO: 2243)
PPE[FK]ASVGSKIF[PS][TS]F[VI][GT]FLKSKD[PA][NS]D
G[TS]EQ
Motif 40:
(SEQ ID NO: 2244)
[IV][ST]A[VA]DLSL[AG]PKLYHL[EQ][VI]ALGH[FY]K[KN]
W[ST][VI]P[ED]SL[TP]HV[HK][NS]Y[MT]K[ALS][LI]FS
[RL][ED]SF[EV]KT

[0304] Motifs 38, 39 and 40 correspond to a consensus sequences which represent conserved protein regions in a DHAR polypeptide of chloroplastic (CHL) and cytosolic (CYT) classes origin, to which S. lycopersicum and H. vulgare belong.

[0305] Most preferably, the DHAR polypeptide of the invention comprises Motifs 41, 42 and 43 in addition to any one or more of, preferably all of, Motif 35, Motif 36, Motif 37, Motif 38, Motif 39 and Motif 40 as defined above. Motifs 41, 42 and 43 may also, in increasing order of preference comprise motifs having at least 49%, 50%, 51%, 52%, 53%, 54%, 55%, 56%, 57%, 58%, 59%, 60%, 61%, 62%, 63%, 64%, 65%, 66%, 67%, 68%, 69%, 70%, 71%, 72%, 73%, 74%, 75%, 76%, 77%, 78%, 79%, 80%, 81%, 82%, 83%, 84%, 85%, 86%, 87%, 88%, 89%, 90%, 91%, 92%, 93%, 94%, 95%, 96%, 97%, 98%, or 99% or more sequence identity to any one of Motifs 41 to 43:

Motif 41:
(SEQ ID NO: 2245)
E[IV]CVKAA[VT]GAPD[VIT]LGDCPF[SC]QRVLLTLEE
Motif 42:
(SEQ ID NO: 2246)
PPE[FY]ASVGSKIF[PG][ST]FV[TK]FLKSKD[AP][NS]DG[TS]
E[QK]
Motif 43:
(SEQ ID NO: 2247)
[IV][TS]AVDLSLAPKLYHL[EQ]VAL[GE]HFK[KG]W[TSK][VI]
PE[SN]LTHVH[NA]Y[TM]K[LAS]LFSRESFEKT

[0306] Motifs 41, 42 and 43 correspond to a consensus sequences which represent conserved protein regions in a DHAR polypeptide of cytosolic class (CYT) to which S. lycopersicum and O. sativa belong.

[0307] In another most preferably embodiment of the present invention, the DHAR polypeptide of the invention comprises Motifs 10, 11 and 12 in addition to Motif 1, Motif 2, Motif 3, Motif 4, Motif 5 and Motif 6 as defined above. Motifs 10, 11 and 12 may also comprise a motif having in increasing order of preference at least 49%, 50%, 51%, 52%, 53%, 54%, 55%, 56%, 57%, 58%, 59%, 60%, 61%, 62%, 63%, 64%, 65%, 66%, 67%, 68%, 69%, 70%, 71%, 72%, 73%, 74%, 75%, 76%, 77%, 78%, 79%, 80%, 81%, 82%, 83%, 84%, 85%, 86%, 87%, 88%, 89%, 90%, 91%, 92%, 93%, 94%, 95%, 96%, 97%, 98%, or 99% or more sequence identity to any one or more of Motifs 10 to 12:

Motif 44:
(SEQ ID NO: 2248)
PLE[VI]C[VA]KAS[ILV]T[TV]P[ND][KR]LGDCPF[TC]QRVLL
TLEEKHLPY[DE][ML]KLVDL[SG]NKP[ED]WF
Motif 45:
(SEQ ID NO: 2249)
W[VI][PA]DSDVITQ[AST]LEEK[YF]P[ED]P[PS]L[AV]TPPEK
ASVGSKIFSTF[IV]GFLKSKDP[SN]DG
Motif 46:
(SEQ ID NO: 2250)
QALL[ND]EL[ST][SA]FNDY[LI]KENGPFING[KE][KDE][IV]S
AADLSL[GA]PKLYH[LM]EIALGH[YF]K[NK]W

[0308] Motifs 44, 45 and 46 correspond to a consensus sequences which represent conserved protein regions in a DHAR polypeptide of chloroplast class (CHL) to which S. lycopersicum and O. sativa belong.

[0309] It is understood that Motif 35, 36, 37, 38, 39, 40, 41, 42, 43, 44, 45 and 46 as referred to herein represent the consensus sequence of the motifs as present in DHAR polypeptides represented in Table A5, especially in SEQ ID NO: 1958. However, it is to be understood that Motifs as defined herein are not limited to their respective sequence but they encompass the corresponding motifs as present in any DHAR polypeptide.

[0310] More preferably, the DHAR polypeptide useful in the methods of the invention comprises in increasing order of preference, at least 2, at least 3, at least 4, at least 5, at least 6, at least 7, at least 8, at least 9, at least 10, at least 11 or all 12 motifs.

[0311] Alternatively, the homologue of a DHAR protein has in increasing order of preference at least 25%, 26%, 27%, 28%, 29%, 30%, 31%, 32%, 33%, 34%, 35%, 36%, 37%, 38%, 39%, 40%, 41%, 42%, 43%, 44%, 45%, 46%, 47%, 48%, 49%, 50%, 51%, 52%, 53%, 54%, 55%, 56%, 57%, 58%, 59%, 60%, 61%, 62%, 63%, 64%, 65%, 66%, 67%, 68%, 69%, 70%, 71%, 72%, 73%, 74%, 75%, 76%, 77%, 78%, 79%, 80%, 81%, 82%, 83%, 84%, 85%, 86%, 87%, 88%, 89%, 90%, 91%, 92%, 93%, 94%, 95%, 96%, 97%, 98%, or 99% overall sequence identity to the amino acid represented by SEQ ID NO: 1958, provided that the DHAR polypeptide comprises any one or more of the 12 conserved motifs as outlined above. The overall sequence identity is determined using a global alignment algorithm, such as the Needleman Wunsch algorithm in the program GAP (GCG Wisconsin Package, Accelrys), preferably with default parameters and preferably with sequences of mature proteins (i.e. without taking into account secretion signals or transit peptides). Compared to overall sequence identity, the sequence identity will generally be higher when only conserved domains or motifs are considered. Preferably the motifs in a DHAR polypeptide have, in increasing order of preference, at least 70%, 71%, 72%, 73%, 74%, 75%, 76%, 77%, 78%, 79%, 80%, 81%, 82%, 83%, 84%, 85%, 86%, 87%, 88%, 89%, 90%, 91%, 92%, 93%, 94%, 95%, 96%, 97%, 98%, or 99% sequence identity to the motifs represented by SEQ ID NO: 2239 to SEQ ID NO: 2250 (Motifs 35 to 46).

[0312] Preferably, the polypeptide sequence which when used in the construction of a phylogenetic tree, such as the one depicted in FIG. 8, clusters with the group of DHAR polypeptides comprising the amino acid sequence represented by SEQ ID NO: 1958 rather than with any other group.

[0313] The terms “domain”, “signature” and “motif” are defined in the “definitions” section herein. Specialist databases exist for the identification of domains, for example, SMART (Schultz et al. (1998) Proc. Natl. Acad. Sci. USA 95, 5857-5864; Letunic et al. (2002) Nucleic Acids Res 30, 242-244), InterPro (Mulder et al., (2003) Nucl. Acids. Res. 31, 315-318), Prosite (Bucher and Bairoch (1994), A generalized profile syntax for biomolecular sequences motifs and its function in automatic sequence interpretation. (In) ISMB-94; Proceedings 2nd International Conference on Intelligent Systems for Molecular Biology. Altman R., Brutlag D., Karp P., Lathrop R., Searls D., Eds., pp 53-61, AAAI Press, Menlo Park; Hulo et al., Nucl. Acids. Res. 32:D134-D137, (2004)), or Pfam (Bateman et al., Nucleic Acids Research 30(1): 276-280 (2002)). A set of tools for in silico analysis of protein sequences is available on the ExPASy proteomics server (Swiss Institute of Bioinformatics (Gasteiger et al., ExPASy: the proteomics server for in-depth protein knowledge and analysis, Nucleic Acids Res. 31:3784-3788 (2003)). Domains or motifs may also be identified using routine techniques, such as by sequence alignment.

[0314] Methods for the alignment of sequences for comparison are well known in the art, such methods include GAP, BESTFIT, BLAST, FASTA and TFASTA. GAP uses the algorithm of Needleman and Wunsch ((1970) J Mol Biol 48: 443-453) to find the global (i.e. spanning the complete sequences) alignment of two sequences that maximizes the number of matches and minimizes the number of gaps. The BLAST algorithm (Altschul et al. (1990) J Mol Biol 215: 403-10) calculates percent sequence identity and performs a statistical analysis of the similarity between the two sequences. The software for performing BLAST analysis is publicly available through the National Centre for Biotechnology Information (NCBI). Homologues may readily be identified using, for example, the ClustalW multiple sequence alignment algorithm (version 1.83), with the default pairwise alignment parameters, and a scoring method in percentage. Global percentages of similarity and identity may also be determined using one of the methods available in the MatGAT software package (Campanella et al., BMC Bioinformatics. 2003 Jul. 10; 4:29. MatGAT: an application that generates similarity/identity matrices using protein or DNA sequences.). Minor manual editing may be performed to optimise alignment between conserved motifs, as would be apparent to a person skilled in the art. Furthermore, instead of using full-length sequences for the identification of homologues, specific domains may also be used. The sequence identity values may be determined over the entire nucleic acid or amino acid sequence or over selected domains or conserved motif(s), using the programs mentioned above using the default parameters. For local alignments, the Smith-Waterman algorithm is particularly useful (Smith T F, Waterman M S (1981) J. Mol. Biol. 147(1); 195-7).

[0315] Furthermore, GDH polypeptides (at least in their native form) typically have glutamate deaminating activity. Tools and techniques for measuring glutamate deaminating activity are well known in the art (Purnell et al., 2005; Skopelitis et al., 2007). Further details are provided in Example 6.

[0316] In addition, GDH polypeptides, when expressed in rice according to the methods of the present invention as outlined in Examples 7 and 8, give plants having increased yield related traits, in particular increased seed yield (such as number of (filled) seeds, seed weight and/or harvest index).

[0317] Furthermore, FLA-like polypeptides (at least in their native form) typically have glycosylation activity, that is, they are susceptible of glycosylation in a cellular environment. Tools and techniques for measuring glycosylation activity are well known in the art. For example detection of N-glycosylated FLA-like polypeptides expressed in Arabidopsis thaliana cells can be carried out by HPLC fractioning followed by colorimetric assays to detect sugars such as described by Johnson et al., Plant Physiol. (2003) 133 (4) 1911-1925.

[0318] In addition, FLA-like polypeptides, when expressed in rice according to the methods of the present invention as outlined in the Example section, give plants having increased yield related traits, in particular increase in any one or more of the following, seed yield, seed fill rate, root biomass and harvest index.

[0319] Furthermore, SAUR polypeptides have plant yield increasing activity, that is, when expressed in rice according to the methods of the present invention as outlined in the Examples section give plants having increased yield related traits, preferably selected from increased emergence vigour, increased number of seeds, increased number of filled seeds, increased number of first panicles, increase canopy and/or root biomass, increased emergence vigour and increased weight of seeds.

[0320] Furthermore, DHAR polypeptides (at least in their native form) typically have a dehydroascorbate reductase activity. Tools and techniques for measuring dehydroascorbate reductase activity are well known in the art (Kato, 1997—Plant Cell Physiol. 38(2): 173-178).

[0321] In addition, DHAR polypeptides, when expressed in rice according to the methods of the present invention as outlined in Examples 7 and 8, give plants having increased yield related traits, in particular increased number of filled seeds, increased number of florets, increased yield relative to control plants.

[0322] Concerning GDH polypeptides, the present invention is illustrated by transforming plants with the nucleic acid sequence represented by SEQ ID NO: 1, encoding the polypeptide sequence of SEQ ID NO: 2. However, performance of the invention is not restricted to these sequences; the methods of the invention may advantageously be performed using any GDH-encoding nucleic acid or GDH polypeptide as defined herein.

[0323] Examples of nucleic acids encoding GDH polypeptides are given in Table A1 of the Examples section herein. Such nucleic acids are useful in performing the methods of the invention. The amino acid sequences given in Table A1 of the Examples section are example sequences of orthologues and paralogues of the GDH polypeptide represented by SEQ ID NO: 2, the terms “orthologues” and “paralogues” being as defined herein. Further orthologues and paralogues may readily be identified by performing a so-called reciprocal blast search. Typically, this involves a first BLAST involving BLASTing a query sequence (for example using any of the sequences listed in Table A1 of the Examples section) against any sequence database, such as the publicly available NCBI database. BLASTN or TBLASTX (using standard default values) are generally used when starting from a nucleotide sequence, and BLASTP or TBLASTN (using standard default values) when starting from a protein sequence. The BLAST results may optionally be filtered. The full-length sequences of either the filtered results or non-filtered results are then BLASTed back (second BLAST) against sequences from the organism from which the query sequence is derived (where the query sequence is SEQ ID NO: 1 or SEQ ID NO: 2, the second BLAST would therefore be against Zea mays sequences). The results of the first and second BLASTs are then compared. A paralogue is identified if a high-ranking hit from the first blast is from the same species as from which the query sequence is derived, a BLAST back then ideally results in the query sequence amongst the highest hits; an orthologue is identified if a high-ranking hit in the first BLAST is not from the same species as from which the query sequence is derived, and preferably results upon BLAST back in the query sequence being among the highest hits.

[0324] Concerning FLA-like polypeptides, the present invention is illustrated by transforming plants with the nucleic acid sequence represented by SEQ ID NO: 171, encoding the polypeptide sequence of SEQ ID NO: 172. However, performance of the invention is not restricted to these sequences; the methods of the invention may advantageously be performed using any FLA-like-encoding nucleic acid or FLA-like polypeptide as defined herein.

[0325] Examples of nucleic acids encoding FLA-like polypeptides are given in Table A2 of the Examples section herein. Such nucleic acids are useful in performing the methods of the invention. The amino acid sequences given in Table A2 of the Examples section are example sequences of orthologues and paralogues of the FLA-like polypeptide represented by SEQ ID NO: 172, the terms “orthologues” and “paralogues” being as defined herein. Further orthologues and paralogues may readily be identified by performing a so-called reciprocal blast search as described in the definitions section; where the query sequence is SEQ ID NO: 171 or SEQ ID NO: 172, the second BLAST (back-BLAST) would be against Lycopersicum esculentum sequences.

[0326] Concerning SAUR polypeptides, the present invention is illustrated by transforming plants with the nucleic acid sequence represented by SEQ ID NO: 501, encoding the polypeptide sequence of SEQ ID NO: 502. However, performance of the invention is not restricted to these sequences; the methods of the invention may advantageously be performed using any SAUR-encoding nucleic acid or SAUR polypeptide as defined herein.

[0327] Examples of nucleic acids encoding SAUR polypeptides are given in Table A3 or A3(i) of the Examples section herein. Such nucleic acids are useful in performing the methods of the invention. The amino acid sequences given in Table A3 or A3(i) of the Examples section are example sequences of orthologues and paralogues of the SAUR polypeptide represented by SEQ ID NO: 502, the terms “orthologues” and “paralogues” being as defined herein. Further orthologues and paralogues may readily be identified by performing a so-called reciprocal blast search as described in the definitions section; where the query sequence is SEQ ID NO: 501 or SEQ ID NO: 502, the second BLAST (back-BLAST) would be against Arabidopsis sequences.

[0328] Concerning SAUR polypeptides, the present invention may be illustrated by transforming plants with the nucleic acid sequence represented by SEQ ID NO: 1163, encoding the polypeptide sequence of SEQ ID NO: 1164 and a nucleic acid encoding any of the polypeptides of Table E and Table F. However, performance of the invention is not restricted to these sequences; the methods of the invention may advantageously be performed using any SAUR-encoding, any SYNP-encoding nucleic acid or SAUR, SYNP polypeptide as defined herein.

[0329] Examples of nucleic acids encoding SAUR polypeptides are given in Table A4 of the Examples section herein. Such nucleic acids are useful in performing the methods of the invention. The amino acid sequences given in Table A4 of the Examples section are example sequences of orthologues and paralogues of the SAUR polypeptide represented by SEQ ID NO: 1164, the terms “orthologues” and “paralogues” being as defined herein. Further orthologues and paralogues may readily be identified by performing a so-called reciprocal blast search as described in the definitions section; where the query sequence is SEQ ID NO: 1163 or SEQ ID NO: 1164, the second BLAST (back-BLAST) would be against Arabidopsis sequences.

[0330] Examples of nucleic acids encoding SYNP polypeptides are given in Table E of the Examples section herein. Such nucleic acids are useful in performing the methods of the invention. The amino acid sequences given in Table F of the Examples section are example sequences of orthologues and paralogues of the SYNP polypeptide represented by the polypeptides of Table E, the terms “orthologues” and “paralogues” being as defined herein. Further orthologues and paralogues may readily be identified by performing a so-called reciprocal blast search as described in the definitions section.

[0331] Concerning DHAR polypeptides, the present invention is illustrated by transforming plants with the nucleic acid sequence represented by SEQ ID NO: 1957, encoding the polypeptide sequence of SEQ ID NO: 1958. However, performance of the invention is not restricted to these sequences; the methods of the invention may advantageously be performed using any DHAR-encoding nucleic acid or DHAR polypeptide as defined herein.

[0332] Examples of nucleic acids encoding DHAR polypeptides are given in Table A5 of the Examples section herein. Such nucleic acids are useful in performing the methods of the invention. The amino acid sequences given in Table A5 of the Examples section are example sequences of orthologues and paralogues of the DHAR polypeptide represented by SEQ ID NO: 1958, the terms “orthologues” and “paralogues” being as defined herein. Further orthologues and paralogues may readily be identified by performing a so-called reciprocal blast search as described in the definitions section; where the query sequence is SEQ ID NO: 1957 or SEQ ID NO: 1958, the second BLAST (back-BLAST) would be against tomato sequences.

[0333] High-ranking hits are those having a low E-value. The lower the E-value, the more significant the score (or in other words the lower the chance that the hit was found by chance). Computation of the E-value is well known in the art. In addition to E-values, comparisons are also scored by percentage identity. Percentage identity refers to the number of identical nucleotides (or amino acids) between the two compared nucleic acid (or polypeptide) sequences over a particular length. In the case of large families, ClustalW may be used, followed by a neighbour joining tree, to help visualize clustering of related genes and to identify orthologues and paralogues.

[0334] Nucleic acid variants may also be useful in practising the methods of the invention. Examples of such variants include nucleic acids encoding homologues and derivatives of any one of the amino acid sequences given in Table A1 to A5, and Table E, and Table F of the Examples section, the terms “homologue” and “derivative” being as defined herein. Also useful in the methods of the invention are nucleic acids encoding homologues and derivatives of orthologues or paralogues of any one of the amino acid sequences given in Table A1 to A5, and Table E, and Table F of the Examples section. Homologues and derivatives useful in the methods of the present invention have substantially the same biological and functional activity as the unmodified protein from which they are derived. Further variants useful in practising the methods of the invention are variants in which codon usage is optimised or in which miRNA target sites are removed.

[0335] Further nucleic acid variants useful in practising the methods of the invention include portions of nucleic acids encoding GDH polypeptides, or FLA polypeptides, or SAUR polypeptides, or DHAR polypeptides, nucleic acids hybridising to nucleic acids encoding GDH polypeptides, or FLA polypeptides, or SAUR polypeptides, or DHAR polypeptides, splice variants of nucleic acids encoding GDH polypeptides, allelic variants of nucleic acids encoding GDH polypeptides, or FLA polypeptides, or SAUR polypeptides, or DHAR polypeptides, and variants of nucleic acids encoding GDH polypeptides, or FLA polypeptides, or SAUR polypeptides, or DHAR polypeptides, obtained by gene shuffling. The terms hybridising sequence, splice variant, allelic variant and gene shuffling are as described herein.

[0336] Further nucleic acid variants useful in practising the methods of the invention include portions of nucleic acids encoding SAUR polypeptides, SYNP polypeptides of protein fusions thereof. Also useful are nucleic acids hybridising to nucleic acids encoding SAUR polypeptides, SYNP polypeptides of protein fusions thereof; splice variants of nucleic acids encoding SAUR polypeptides, SYNP polypeptides of protein fusions thereof; allelic variants of nucleic acids encoding SAUR polypeptides, SYNP polypeptides of protein fusions thereof and variants of nucleic acids encoding SAUR polypeptides, SYNP polypeptides of protein fusions thereof obtained by gene shuffling. The terms hybridising sequence, splice variant, allelic variant and gene shuffling are as described herein.

[0337] Nucleic acids encoding GDH polypeptides, or FLA polypeptides, or SAUR polypeptides, or SYNP polypeptides, or fusion proteins of SAUR polypeptides and SYNP polypeptides, or DHAR polypeptides, need not be full-length nucleic acids, since performance of the methods of the invention does not rely on the use of full-length nucleic acid sequences. According to the present invention, there is provided a method for enhancing yield-related traits in plants, comprising introducing and expressing in a plant a portion of any one of the nucleic acid sequences given in Table A1 to A5, and Table E, and Table F of the Examples section, or a portion of a nucleic acid encoding an orthologue, paralogue or homologue of any of the amino acid sequences given in Table A1 to A5, and Table E, and Table F of the Examples section.

[0338] A portion of a nucleic acid may be prepared, for example, by making one or more deletions to the nucleic acid. The portions may be used in isolated form or they may be fused to other coding (or non-coding) sequences in order to, for example, produce a protein that combines several activities. When fused to other coding sequences, the resultant polypeptide produced upon translation may be bigger than that predicted for the protein portion.

[0339] Concerning GDH polypeptides, portions useful in the methods of the invention, encode a GDH polypeptide as defined herein, and have substantially the same biological activity as the amino acid sequences given in Table A1 of the Examples section. Preferably, the portion is a portion of any one of the nucleic acids given in Table A1 of the Examples section, or is a portion of a nucleic acid encoding an orthologue or paralogue of any one of the amino acid sequences given in Table A1 of the Examples section. Preferably the portion is at least 500, 550, 600, 650, 700, 750, 800, 850, 900, 950, 1000, 1050, 1100, 1150, 1200, 1250, 1300, 1350, 1400 consecutive nucleotides in length, the consecutive nucleotides being of any one of the nucleic acid sequences given in Table A1 of the Examples section, or of a nucleic acid encoding an orthologue or paralogue of any one of the amino acid sequences given in Table A1 of the Examples section. Most preferably the portion is a portion of the nucleic acid of SEQ ID NO: 1. Preferably, the portion encodes a fragment of an amino acid sequence which comprises a Glu/Phe/Leu/Val dehydrogenase, C-terminal domain (Pfam entry PF00208) and a Glu/Phe/Leu/Val dehydrogenase, dimerisation region (Pfam entry PF02812), which has glutamate deaminating activity and which, when used in the construction of a phylogenetic tree, such as the one depicted in FIG. 3, clusters with GDH polypeptides, preferably with class I GDH polypeptides or with moss GDH polypeptides related to class I, more preferably to group of beta subunit GDH polypeptides comprising the amino acid sequence represented by SEQ ID NO: 2 rather than with any other group.

[0340] Concerning FLA-like polypeptides, portions useful in the methods of the invention, encode a FLA-like polypeptide as defined herein, and have substantially the same biological activity as the amino acid sequences given in Table A2 of the Examples section. Preferably, the portion is a portion of any one of the nucleic acids given in Table A2 of the Examples section, or is a portion of a nucleic acid encoding an orthologue or paralogue of any one of the amino acid sequences given in Table A2 of the Examples section. Preferably the portion is at least 100, 200, 300, 400, 500, 550, 600, 650, 700, 750, 800, 850, 900, 950, 1000 consecutive nucleotides in length, the consecutive nucleotides being of any one of the nucleic acid sequences given in Table A2 of the Examples section, or of a nucleic acid encoding an orthologue or paralogue of any one of the amino acid sequences given in Table A2 of the Examples section. Most preferably the portion is a portion of the nucleic acid of SEQ ID NO: 171. Preferably, the portion encodes a fragment of an amino acid sequence which comprises at least one fasciclin domain.

[0341] Concerning SAUR polypeptides, portions useful in the methods of the invention, encode a SAUR polypeptide as defined herein, and have substantially the same biological activity as the amino acid sequences given in Table A3 or A3(i) of the Examples section. Preferably, the portion is a portion of any one of the nucleic acids given in Table A3 or A3(i) of the Examples section, or is a portion of a nucleic acid encoding an orthologue or paralogue of any one of the amino acid sequences given in Table A3 or A3(i) of the Examples section. Preferably the portion is at least 50, 100, 200, 300, 400, 500, 550, 600, 650, 700, 750, 800, 850, 900, 950, 1000 consecutive nucleotides in length, the consecutive nucleotides being of any one of the nucleic acid sequences given in Table A3 or A3(i) of the Examples section, or of a nucleic acid encoding an orthologue or paralogue of any one of the amino acid sequences given in Table A3 or A3(i) of the Examples section. Most preferably the portion is a portion of the nucleic acid of SEQ ID NO: 501. Preferably, the portion encodes a fragment of an amino acid sequence comprising an Auxin inducible domain.

[0342] Concerning SAUR polypeptides, portions useful in the methods of the invention, encode a SAUR polypeptide, a SYNP polypeptide or protein fusions thereof as defined herein, and have substantially the same biological activity as the amino acid sequences given in Table A4, Table E and Table F of the Examples section. Preferably, the portion is a portion of any one of the nucleic acids given in Table A, Table E or Table F of the Examples section, or is a portion of a nucleic acid encoding an orthologue or paralogue of any one of the amino acid sequences given in Table A, Table E or Table F of the Examples section. Preferably the portion is at least 50, 100, 200, 300, 400, 500, 550, 600, 650, 700, 750, 800, 850, 900, 950, 1000 consecutive nucleotides in length, the consecutive nucleotides being of any one of the nucleic acid sequences given in Table A, Table E or Table F of the Examples section, or of a nucleic acid encoding an orthologue or paralogue of any one of the amino acid sequences given in Table A, Table E or Table F of the Examples section.

[0343] Concerning DHAR polypeptides, portions useful in the methods of the invention, encode a DHAR polypeptide as defined herein, and have substantially the same biological activity as the amino acid sequences given in Table A5 of the Examples section. Preferably, the portion is a portion of any one of the nucleic acids given in Table A5 of the Examples section, or is a portion of a nucleic acid encoding an orthologue or paralogue of any one of the amino acid sequences given in Table A5 of the Examples section. Preferably the portion is at least 500, 550, 600, 650, 700, 750, 800, 850, 900, 950, 1000 consecutive nucleotides in length, the consecutive nucleotides being of any one of the nucleic acid sequences given in Table A5 of the Examples section, or of a nucleic acid encoding an orthologue or paralogue of any one of the amino acid sequences given in Table A5 of the Examples section. Most preferably the portion is a portion of the nucleic acid of SEQ ID NO: 1957. Preferably, the portion encodes a fragment of an amino acid sequence which, when used in the construction of a phylogenetic tree, such as the one depicted in FIG. 8, clusters with the group of DHAR polypeptides comprising the amino acid sequence represented by SEQ ID NO: 1958 rather than with any other group. Clustering sequences preferably comprise any one or more of motifs 35 to 46; and/or comprises dehydroascorbate reductase biological activity; and/or have at least 49% sequence identity to SEQ ID NO: 1958 or to any of the polypeptides depicted in Table A5.

[0344] Another nucleic acid variant useful in the methods of the invention is a nucleic acid capable of hybridising, under reduced stringency conditions, preferably under stringent conditions, with a nucleic acid encoding a GDH polypeptide, or a FLA polypeptide, or a SAUR polypeptide, or an SYNP polypeptide, or a fusion protein of SAUR polypeptides and SYNP polypeptide, or a DHAR polypeptide, as defined herein, or with a portion as defined herein.

[0345] According to the present invention, there is provided a method for enhancing yield-related traits in plants, comprising introducing and expressing in a plant a nucleic acid capable of hybridizing to any one of the nucleic acids given in Table A1 to A5, and Table E, and Table F of the Examples section, or comprising introducing and expressing in a plant a nucleic acid capable of hybridising to a nucleic acid encoding an orthologue, paralogue or homologue of any of the nucleic acid sequences given in Table A1 to A5, and Table E, and Table F of the Examples section.

[0346] Concerning GDH polypeptides, hybridising sequences useful in the methods of the invention encode a GDH polypeptide as defined herein, having substantially the same biological activity as the amino acid sequences given in Table A1 of the Examples section.

[0347] Preferably, the hybridising sequence is capable of hybridising to the complement of any one of the nucleic acids given in Table A1 of the Examples section, or to a portion of any of these sequences, a portion being as defined above, or the hybridising sequence is capable of hybridising to the complement of a nucleic acid encoding an orthologue or paralogue of any one of the amino acid sequences given in Table A1 of the Examples section. Most preferably, the hybridising sequence is capable of hybridising to the complement of a nucleic acid as represented by SEQ ID NO: 1 or to a portion thereof.

[0348] Preferably, the hybridising sequence encodes a polypeptide with an amino acid sequence which comprises a Glu/Phe/Leu/Val dehydrogenase, C-terminal domain (Pfam entry PF00208) and a Glu/Phe/Leu/Val dehydrogenase, dimerisation region (Pfam entry PF02812), which has glutamate deaminating activity and which, when full-length and used in the construction of a phylogenetic tree, such as the one depicted in FIG. 3, clusters with GDH polypeptides, preferably with class I GDH polypeptides or with moss GDH polypeptides related to class I, more preferably to group of beta subunit GDH polypeptides comprising the amino acid sequence represented by SEQ ID NO: 2 rather than with any other group.

[0349] Concerning FLA-like polypeptides, hybridising sequences useful in the methods of the invention encode a FLA-like polypeptide as defined herein, having substantially the same biological activity as the amino acid sequences given in Table A2 of the Examples section. Preferably, the hybridising sequence is capable of hybridising to the complement of any one of the nucleic acids given in Table A2 of the Examples section, or to a portion of any of these sequences, a portion being as defined above, or the hybridising sequence is capable of hybridising to the complement of a nucleic acid encoding an orthologue or paralogue of any one of the amino acid sequences given in Table A2 of the Examples section. Most preferably, the hybridising sequence is capable of hybridising to the complement of a nucleic acid as represented by SEQ ID NO: 171 or to a portion thereof.

[0350] Preferably, the hybridising sequence encodes a polypeptide comprising at least one fasciclin domain.

[0351] Concerning SAUR polypeptides, hybridising sequences useful in the methods of the invention encode a SAUR polypeptide as defined herein, having substantially the same biological activity as the amino acid sequences given in Table A3 or A3(i) of the Examples section. Preferably, the hybridising sequence is capable of hybridising to the complement of any one of the nucleic acids given in Table A3 or A3(i) of the Examples section, or to a portion of any of these sequences, a portion being as defined above, or the hybridising sequence is capable of hybridising to the complement of a nucleic acid encoding an orthologue or paralogue of any one of the amino acid sequences given in Table A3 or A3(i) of the Examples section. Most preferably, the hybridising sequence is capable of hybridising to the complement of a nucleic acid as represented by SEQ ID NO: 501 or to a portion thereof.

[0352] Preferably, the hybridising sequence encodes a polypeptide with an amino acid sequence comprising an Auxin inducible domain.

[0353] Concerning SAUR polypeptides, or SYNP polypeptides, or fusion proteins of SAUR polypeptides and SYNP polypeptides, hybridising sequences useful in the methods of the invention encode a SAUR polypeptide as defined herein, having substantially the same biological activity as the amino acid sequences given in Table A4, E, F of the Examples section. Preferably, the hybridising sequence is capable of hybridising to the complement of any one of the nucleic acids given in Table A4, E, F of the Examples section, or to a portion of any of these sequences, a portion being as defined above, or the hybridising sequence is capable of hybridising to the complement of a nucleic acid encoding an orthologue or paralogue of any one of the amino acid sequences given in Table A4, E, F of the Examples section.

[0354] Concerning DHAR polypeptides, hybridising sequences useful in the methods of the invention encode a DHAR polypeptide as defined herein, having substantially the same biological activity as the amino acid sequences given in Table A5 of the Examples section. Preferably, the hybridising sequence is capable of hybridising to the complement of any one of the nucleic acids given in Table A5 of the Examples section, or to a portion of any of these sequences, a portion being as defined above, or the hybridising sequence is capable of hybridising to the complement of a nucleic acid encoding an orthologue or paralogue of any one of the amino acid sequences given in Table A5 of the Examples section. Most preferably, the hybridising sequence is capable of hybridising to the complement of a nucleic acid as represented by SEQ ID NO: 1957 or to a portion thereof.

[0355] Preferably, the hybridising sequence encodes a polypeptide with an amino acid sequence which, when full-length and used in the construction of a phylogenetic tree, such as the one depicted in FIG. 8, clusters with the group of DHAR polypeptides (EC 1.8.5.1.) comprising the amino acid sequence represented by SEQ ID NO: 1958 rather than with any other group. Hybridising sequences preferably encode a polypeptide comprising any one or more of motifs 35 to 46 and/or have dehydroascorbate reductase biological activity and/or at least 49% sequence identity to SEQ ID NO: 1958 or to any of the polypeptides depicted in Table A5.

[0356] Another nucleic acid variant useful in the methods of the invention is a splice variant encoding a GDH polypeptide, or a FLA polypeptide, or a SAUR polypeptide, or a DHAR polypeptide, as defined hereinabove, a splice variant being as defined herein. Another nucleic acid variant useful in the methods of the invention is a splice variant encoding a SAUR polypeptide, a SYNP polypeptide as defined hereinabove or a fusion of both polypeptides, a splice variant being as defined herein.

[0357] According to the present invention, there is provided a method for enhancing yield-related traits in plants, comprising introducing and expressing in a plant a splice variant of any one of the nucleic acid sequences given in Table A1 to A5, and Table E, and Table F of the Examples section, or a splice variant of a nucleic acid encoding an orthologue, paralogue or homologue of any of the amino acid sequences given in Table A1 to A5, and Table E, and Table F of the Examples section.

[0358] Concerning GDH polypeptides, preferred splice variants are splice variants of a nucleic acid represented by SEQ ID NO: 1, or a splice variant of a nucleic acid encoding an orthologue or paralogue of SEQ ID NO: 2. Preferably, the amino acid sequence encoded by the splice variant comprises a Glu/Phe/Leu/Val dehydrogenase, C-terminal domain (Pfam entry PF00208) and a Glu/Phe/Leu/Val dehydrogenase, dimerisation region (Pfam entry PF02812), has glutamate deaminating activity and, when used in the construction of a phylogenetic tree, such as the one depicted in FIG. 3, clusters with GDH polypeptides, preferably with class I GDH polypeptides or with moss GDH polypeptides related to class I, more preferably to group of beta subunit GDH polypeptides comprising the amino acid sequence represented by SEQ ID NO: 2 rather than with any other group.

[0359] Concerning FLA-like polypeptides, preferred splice variants are splice variants of a nucleic acid represented by SEQ ID NO: 171, or a splice variant of a nucleic acid encoding an orthologue or paralogue of SEQ ID NO: 172. Preferably, the amino acid sequence encoded by the splice variant comprises at least one fasciclin domain.

[0360] Concerning SAUR polypeptides, preferred splice variants are splice variants of a nucleic acid represented by SEQ ID NO: 501, or a splice variant of a nucleic acid encoding an orthologue or paralogue of SEQ ID NO: 502. Preferably, the amino acid sequence encoded by the splice variant comprises an Auxin inducible domain.

[0361] Concerning DHAR polypeptides, preferred splice variants are splice variants of a nucleic acid represented by SEQ ID NO: 1957, or a splice variant of a nucleic acid encoding an orthologue or paralogue of SEQ ID NO: 1958. Preferably, the amino acid sequence encoded by the splice variant, when used in the construction of a phylogenetic tree, such as the one depicted in FIG. 8, clusters with the group of DHAR polypeptides comprising the amino acid sequence represented by SEQ ID NO: 1958 rather than with any other group. The splice variants preferably comprise any one or more of motifs 35 to 46 and/or have dehydroascorbate reductase biological activity and/or encode a polypeptide having at least 49% sequence identity to SEQ ID NO: 1958 or to any of the DHAR polypeptides depicted in Table A5.

[0362] Another nucleic acid variant useful in performing the methods of the invention is an allelic variant of a nucleic acid encoding a GDH polypeptide, or a FLA polypeptide, or a SAUR polypeptide, or a DHAR polypeptide, as defined hereinabove, an allelic variant being as defined herein.

[0363] Concerning SAUR polypeptides, or SYNP polypeptides, or fusion proteins of SAUR polypeptides and SYNP polypeptides, another nucleic acid variant useful in performing the methods of the invention is an allelic variant of a nucleic acid encoding a SAUR polypeptide, a SYNP polypeptide as defined hereinabove or a fusion of both polypeptides, an allelic variant being as defined herein.

[0364] According to the present invention, there is provided a method for enhancing yield-related traits in plants, comprising introducing and expressing in a plant an allelic variant of any one of the nucleic acids given in Table A1 to A5, and Table E, and Table F of the Examples section, or comprising introducing and expressing in a plant an allelic variant of a nucleic acid encoding an orthologue, paralogue or homologue of any of the amino acid sequences given in Table A1 to A5, and Table E, and Table F of the Examples section.

[0365] Concerning GDH polypeptides, the polypeptides encoded by allelic variants useful in the methods of the present invention have substantially the same biological activity as the GDH polypeptide of SEQ ID NO: 2 and any of the amino acids depicted in Table A1 of the Examples section. Allelic variants exist in nature, and encompassed within the methods of the present invention is the use of these natural alleles. Preferably, the allelic variant is an allelic variant of SEQ ID NO: 1 or an allelic variant of a nucleic acid encoding an orthologue or paralogue of SEQ ID NO: 2. Preferably, the amino acid sequence encoded by the allelic variant comprises a Glu/Phe/Leu/Val dehydrogenase, C-terminal domain (Pfam entry PF00208) and a Glu/Phe/Leu/Val dehydrogenase, dimerisation region (Pfam entry PF02812), has glutamate deaminating activity and, when used in the construction of a phylogenetic tree, such as the one depicted in FIG. 3, clusters with GDH polypeptides, preferably with class I GDH polypeptides or with moss GDH polypeptides related to class I, more preferably to group of beta subunit GDH polypeptides comprising the amino acid sequence represented by SEQ ID NO: 2 rather than with any other group.

[0366] Concerning FLA-like polypeptides, the polypeptides encoded by allelic variants useful in the methods of the present invention have substantially the same biological activity as the FLA-like polypeptide of SEQ ID NO: 172 and any of the amino acids depicted in Table A2 of the Examples section. Allelic variants exist in nature, and encompassed within the methods of the present invention is the use of these natural alleles. Preferably, the allelic variant is an allelic variant of SEQ ID NO: 171 or an allelic variant of a nucleic acid encoding an orthologue or paralogue of SEQ ID NO: 172. Preferably, the amino acid sequence encoded by the allelic variant comprises at least one fasciclin domain.

[0367] Concerning SAUR polypeptides, the polypeptides encoded by allelic variants useful in the methods of the present invention have substantially the same biological activity as the SAUR polypeptide of SEQ ID NO: 502 and any of the amino acids depicted in Table A3 or A3(i) of the Examples section. Allelic variants exist in nature, and encompassed within the methods of the present invention is the use of these natural alleles. Preferably, the allelic variant is an allelic variant of SEQ ID NO: 501 or an allelic variant of a nucleic acid encoding an orthologue or paralogue of SEQ ID NO: 502. Preferably, the amino acid sequence encoded by the allelic variant comprises an Auxin inducible domain.

[0368] Concerning SAUR polypeptides, or SYNP polypeptides, or fusion proteins of SAUR polypeptides and SYNP polypeptides, the polypeptides encoded by allelic variants useful in the methods of the present invention have substantially the same biological activity as the SAUR polypeptide and the SYNP or a protein fusion of the same and any of the amino acids depicted in Table A4, and Table E, and Table F of the Examples section. Allelic variants exist in nature, and encompassed within the methods of the present invention is the use of these natural alleles.

[0369] Concerning DHAR polypeptides, the polypeptides encoded by allelic variants useful in the methods of the present invention have substantially the same biological activity as the DHAR polypeptide of SEQ ID NO: 1958 and any of the amino acids depicted in Table A5 of the Examples section. Allelic variants exist in nature, and encompassed within the methods of the present invention is the use of these natural alleles. Preferably, the allelic variant is an allelic variant of SEQ ID NO: 1957 or an allelic variant of a nucleic acid encoding an orthologue or paralogue of SEQ ID NO: 1958. Preferably, the amino acid sequence encoded by the allelic variant, when used in the construction of a phylogenetic tree, such as the one depicted in FIG. 8, clusters with the group of DHAR polypeptides comprising the amino acid sequence represented by SEQ ID NO: 1958 rather than with any other group. Clustering sequences preferably comprise any one or more of motifs 35 to 46 and/or dehydroascorbate reductase biological activity and/or at least 49% sequence identity to SEQ ID NO: 1958 or to any of the polypeptides depicted in Table A5.

[0370] Gene shuffling or directed evolution may also be used to generate variants of nucleic acids encoding GDH polypeptides, or FLA polypeptides, or SAUR polypeptides, or SYNP polypeptides, or fusion proteins of SAUR polypeptides and SYNP polypeptides, or DHAR polypeptides, as defined above; the term “gene shuffling” being as defined herein.

[0371] According to the present invention, there is provided a method for enhancing yield-related traits in plants, comprising introducing and expressing in a plant a variant of any one of the nucleic acid sequences given in Table A1 to A5, and Table E, and Table F of the Examples section, or comprising introducing and expressing in a plant a variant of a nucleic acid encoding an orthologue, paralogue or homologue of any of the amino acid sequences given in Table A1 to A5, and Table E, and Table F of the Examples section, which variant nucleic acid is obtained by gene shuffling.

[0372] Concerning GDH polypeptides, preferably, the amino acid sequence encoded by the variant nucleic acid obtained by gene shuffling comprises a Glu/Phe/Leu/Val dehydrogenase, C-terminal domain (Pfam entry PF00208) and a Glu/Phe/Leu/Val dehydrogenase, dimerisation region (Pfam entry PF02812), has glutamate deaminating activity and, when used in the construction of a phylogenetic tree such as the one depicted in FIG. 3, clusters with GDH polypeptides, preferably with class I GDH polypeptides or with moss GDH polypeptides related to class I, more preferably to group of beta subunit GDH polypeptides comprising the amino acid sequence represented by SEQ ID NO: 2 rather than with any other group.

[0373] Concerning FLA-like polypeptides, preferably, the amino acid sequence encoded by the variant nucleic acid obtained by gene shuffling comprises at least one fasciclin domain.

[0374] Concerning SAUR polypeptides, preferably, the amino acid sequence encoded by the variant nucleic acid obtained by gene shuffling, comprises an Auxin inducible domain.

[0375] Concerning DHAR polypeptides, preferably, the amino acid sequence encoded by the variant nucleic acid obtained by gene shuffling, when used in the construction of a phylogenetic tree such as the one depicted FIG. 8, clusters with the group of DHAR polypeptides comprising the amino acid sequence represented by SEQ ID NO: 1958 rather than with any other group and/or comprises any one or more of motifs 35 to 46 and/or has dehydroascorbate reductase biological activity and/or has at least 49% sequence identity to SEQ ID NO: 1958 or to any one or more of the polypeptides depicted in Table A5.

[0376] Furthermore, nucleic acid variants may also be obtained by site-directed mutagenesis. Several methods are available to achieve site-directed mutagenesis, the most common being PCR based methods (Current Protocols in Molecular Biology. Wiley Eds.).

[0377] Nucleic acids encoding GDH polypeptides may be derived from any natural or artificial source. The nucleic acid may be modified from its native form in composition and/or genomic environment through deliberate human manipulation. Preferably the GDH polypeptide-encoding nucleic acid is from a plant, further preferably from a monocotyledonous plant, more preferably from the family Poaceae, most preferably the nucleic acid is from Zea mays.

[0378] Nucleic acids encoding FLA-like polypeptides may be derived from any natural or artificial source. The nucleic acid may be modified from its native form in composition and/or genomic environment through deliberate human manipulation. Preferably the FLA-like polypeptide-encoding nucleic acid is from a plant, further preferably from a dicotyledonous plant, more preferably from the family brassicaceae or from the populus genus, most preferably the nucleic acid is from Lycopersicum esculentum or from Populus trichocarpa.

[0379] Nucleic acids encoding SAUR polypeptides may be derived from any natural or artificial source. The nucleic acid may be modified from its native form in composition and/or genomic environment through deliberate human manipulation. Preferably the SAUR polypeptide-encoding nucleic acid is from a plant, further preferably from a dicotyledonous plant, more preferably from the family brasicaceae, most preferably the nucleic acid is from Arabidopsis thaliana.

[0380] Nucleic acids encoding the polypeptides useful in the methods of the invention may be derived from any natural or artificial source. The nucleic acid may be modified from its native form in composition and/or genomic environment through deliberate human manipulation. Preferably the SAUR, SYNP or fusion thereof polypeptide-encoding nucleic acid is from a plant, further preferably from a dicotyledonous plant, more preferably from the family brasicaceae, most preferably the nucleic acid is from Arabidopsis thaliana.

[0381] Nucleic acids encoding DHAR polypeptides may be derived from any natural or artificial source. The nucleic acid may be modified from its native form in composition and/or genomic environment through deliberate human manipulation. Preferably the DHAR polypeptide-encoding nucleic acid is from a plant, further preferably from a dicotyledonous plant, more preferably from the family Solanaceae, most preferably the nucleic acid is from Solanum lycopersicum.

[0382] Concerning GDH polypeptides, performance of the methods of the invention gives plants having enhanced yield-related traits. In particular performance of the methods of the invention gives plants having increased yield, especially increased seed yield and/or enhanced root growth and/or increased early vigour, relative to control plants under non-stress conditions or under stress conditions, provided that the stress conditions do not encompass nitrogen deficiency. The terms “yield”, “seed yield” and “early vigour” are described in more detail in the “definitions” section herein.

[0383] Concerning FLA-like polypeptides, performance of the methods of the invention gives plants having enhanced yield-related traits. In particular performance of the methods of the invention gives plants having increased yield, especially increased seed yield relative to control plants. The terms “yield” and “seed yield” are described in more detail in the “definitions” section herein.

[0384] Concerning SAUR polypeptides, performance of the methods of the invention gives plants having enhanced yield-related traits. In particular performance of the methods of the invention gives plants having increased yield, especially increased seed yield relative to control plants. The terms “yield” and “seed yield” are described in more detail in the “definitions” section herein.

[0385] Concerning SAUR polypeptides, or SYNP polypeptides, or fusion proteins of SAUR polypeptides and SYNP polypeptides, performance of the methods of the invention gives plants having enhanced yield-related traits. In particular performance of the methods of the invention gives plants having increased yield, especially increased seed yield relative to control plants. The terms “yield” and “seed yield” are described in more detail in the “definitions” section herein.

[0386] Concerning DHAR polypeptides, performance of the methods of the invention gives plants having enhanced yield-related traits. In particular performance of the methods of the invention gives plants having increased yield, especially increased seed yield relative to control plants. The terms “yield” and “seed yield” are described in more detail in the “definitions” section herein.

[0387] Reference herein to enhanced yield-related traits is taken to mean an increase in biomass (weight) of one or more parts of a plant, which may include aboveground (harvestable) parts and/or (harvestable) parts below ground. In particular, such harvestable parts are seeds and/or roots, and performance of the methods of the invention results in plants having increased seed yield relative to the seed yield of control plants and/or enhanced root growth, compared to control plants.

[0388] Reference herein to enhanced yield-related traits is taken to mean an increase early vigour and/or in biomass (weight) of one or more parts of a plant, which may include aboveground (harvestable) parts and/or (harvestable) parts below ground. In particular, such harvestable parts are seeds, and performance of the methods of the invention results in plants having increased seed yield relative to the seed yield of control plants.

[0389] Taking corn as an example, a yield increase may be manifested as one or more of the following: increase in the number of plants established per square meter, an increase in the number of ears per plant, an increase in the number of rows, number of kernels per row, kernel weight, thousand kernel weight, ear length/diameter, increase in the seed filling rate (which is the number of filled seeds divided by the total number of seeds and multiplied by 100), among others.

[0390] Taking rice as an example, a yield increase may manifest itself as an increase in one or more of the following: number of plants per square meter, number of panicles per plant, number of spikelets per panicle, number of flowers (florets) per panicle (which is expressed as a ratio of the number of filled seeds over the number of primary panicles), increase in the seed filling rate (which is the number of filled seeds divided by the total number of seeds and multiplied by 100), increase in thousand kernel weight, among others.

[0391] Concerning GDH polypeptides, the present invention provides a method for increasing yield, especially seed yield and/or root yield of plants, relative to control plants, which method comprises modulating expression in a plant of a nucleic acid encoding a GDH polypeptide as defined herein.

[0392] Concerning FLA-like polypeptides, the present invention provides a method for increasing yield-related traits, especially seed yield of plants, relative to control plants, which method comprises modulating expression in a plant of a nucleic acid encoding a FLA-like polypeptide as defined herein.

[0393] According to a preferred feature of the present invention, performance of the methods of the invention gives plants having an increased growth rate relative to control plants. Therefore, according to the present invention, there is provided a method for increasing the growth rate of plants, which method comprises modulating expression in a plant of a nucleic acid encoding a FLA-like polypeptide as defined herein.

[0394] Concerning SAUR polypeptides, the present invention provides a method for increasing yield-related traits, especially seed yield of plants, relative to control plants, which method comprises modulating expression in a plant of a nucleic acid encoding a SAUR polypeptide as defined herein.

[0395] According to a preferred feature of the present invention, performance of the methods of the invention gives plants having an increased growth rate relative to control plants. Therefore, according to the present invention, there is provided a method for increasing the growth rate of plants, which method comprises modulating expression in a plant of a nucleic acid encoding a SAUR polypeptide as defined herein.

[0396] Concerning SAUR polypeptides, or SYNP polypeptides, or fusion proteins of SAUR polypeptides and SYNP polypeptides, the present invention provides a method for increasing yield-related traits, especially seed yield of plants, relative to control plants, which method comprises modulating expression in a plant of a nucleic acid encoding a SAUR and a SYNP polypeptide or a fusion thereof as defined herein.

[0397] According to a preferred feature of the present invention, performance of the methods of the invention gives plants having an increased growth rate relative to control plants. Therefore, according to the present invention, there is provided a method for increasing the growth rate of plants, which method comprises modulating expression in a plant of a nucleic acid encoding a polypeptide useful in the method of the as defined herein.

[0398] Concerning DHAR polypeptides, the present invention provides a method for increasing yield, especially seed yield of plants, relative to control plants, which method comprises modulating expression in a plant of a nucleic acid encoding a DHAR polypeptide as defined herein.

[0399] According to a preferred feature of the present invention, performance of the methods of the invention gives plants having an increased growth rate relative to control plants. Therefore, according to the present invention, there is provided a method for increasing the growth rate of plants, which method comprises modulating expression in a plant of a nucleic acid encoding a DHAR polypeptide as defined herein.

[0400] Since the transgenic plants according to the present invention have increased yield and/or yield-related traits, it is likely that these plants exhibit an increased growth rate (during at least part of their life cycle), relative to the growth rate of control plants at a corresponding stage in their life cycle.

[0401] Performance of the methods of the invention gives plants grown under non-stress conditions or under mild drought conditions increased yield relative to control plants grown under comparable conditions. Therefore, according to the present invention, there is provided a method for increasing yield in plants grown under non-stress conditions or under mild drought conditions, which method comprises modulating expression in a plant of a nucleic acid encoding a GDH polypeptide.

[0402] Performance of the methods of the invention gives plants grown under conditions of nutrient deficiency, particularly under conditions of nitrogen deficiency, increased yield relative to control plants grown under comparable conditions. Therefore, according to the present invention, there is provided a method for increasing yield in plants grown under conditions of nutrient deficiency, which method comprises modulating expression in a plant of a nucleic acid encoding a GDH polypeptide, a FLA polypeptide, or a SAUR polypeptide or an SYNP polypeptide, or a fusion protein of SAUR polypeptides and SYNP polypeptide, or a DHAR polypeptide. Nutrient deficiency may result from a lack of nutrients such as phosphates and other phosphorous-containing compounds, potassium, calcium, magnesium, manganese, iron and boron, amongst others.

[0403] Performance of the methods of the invention gives plants grown under conditions of salt stress, increased yield relative to control plants grown under comparable conditions. Therefore, according to the present invention, there is provided a method for increasing yield in plants grown under conditions of salt stress, which method comprises modulating expression in a plant of a nucleic acid encoding a GDH polypeptide, or a FLA polypeptide, or a SAUR polypeptide, or an SYNP polypeptide, or a fusion protein of SAUR polypeptides and SYNP polypeptide, or a DHAR polypeptide. The term salt stress is not restricted to common salt (NaCl), but may be any one or more of: NaCl, KCl, LiCl, MgCl₂, CaCl₂, amongst others.

[0404] The present invention encompasses plants or parts thereof (including seeds) obtainable by the methods according to the present invention. The plants or parts thereof comprise a nucleic acid transgene encoding a GDH polypeptide as defined above.

[0405] The invention also provides genetic constructs and vectors to facilitate introduction and/or expression in plants of nucleic acids encoding GDH polypeptides, or FLA polypeptides, or SAUR polypeptides, or DHAR polypeptides. The gene constructs may be inserted into vectors, which may be commercially available, suitable for transforming into plants and suitable for expression of the gene of interest in the transformed cells. The invention also provides use of a gene construct as defined herein in the methods of the invention.

[0406] More specifically, the present invention provides a construct comprising:
[0407] (a) a nucleic acid encoding a GDH polypeptide as defined above;
[0408] (b) one or more control sequences capable of driving expression of the nucleic acid sequence of (a); and optionally
[0409] (c) a transcription termination sequence.

[0410] Preferably, the nucleic acid encoding a GDH polypeptide, or a FLA polypeptide, or a SAUR polypeptide, or a DHAR polypeptide, is as defined above. The term “control sequence” and “termination sequence” are as defined herein.

[0411] More specifically, the present invention provides a construct comprising:
[0412] (i) a first nucleic acid encoding at least a SAUR polypeptide and a second nucleic acid encoding one or more SYNP polypeptides, wherein the first and second nucleic acids are comprised in a single nucleic acid molecule or in multiple, at least two, nucleic acid molecules;
[0413] (ii) one or more control sequences capable of driving expression of the nucleic acid sequence of (i), preferably a plant promoter, more preferably a constitutive promoter, even more preferably a GOS2 promoter, most preferably a GOS2 promoter from rice; and optionally
[0414] (iii) a transcription termination sequence.

[0415] Preferably, the nucleic acid encoding a polypeptide useful in the methods of the invention is as defined above. The term “control sequence” and “termination sequence” are as defined herein.

[0416] The present invention also provides for a mixture of constructs useful for example, for simultaneous introduction and expression in plants of two or three nucleic acid sequence encoding a SAUR and a SYNP polypeptide as defined herein; wherein at least one construct comprises:
[0417] (a) a nucleic acid sequence encoding a SAUR polypeptide;
[0418] (b) one or more control sequences capable of driving expression of the nucleic acid sequence of (a); and optionally
[0419] (c) a transcription termination sequence,
   and wherein at least one other construct comprises:
[0420] (d) a nucleic acid sequence nucleic acid sequence encoding a SYNP polypeptide as defined herein;
[0421] (e) one or more control sequences capable of driving expression of the nucleic acid sequence of (d); and optionally
[0422] (f) a transcription termination sequence.

[0423] Plants are transformed with a vector comprising any of the nucleic acids described above. The skilled artisan is well aware of the genetic elements that must be present on the vector in order to successfully transform, select and propagate host cells containing the sequence of interest. The sequence of interest is operably linked to one or more control sequences (at least to a promoter).

[0424] Advantageously, any type of promoter, whether natural or synthetic, may be used to drive expression of the nucleic acid sequence, but preferably the promoter is of plant origin. A constitutive promoter is particularly useful in the methods. Preferably the constitutive promoter is a ubiquitous constitutive promoter of medium strength. See the “Definitions” section herein for definitions of the various promoter types.

[0425] Concerning GDH polypeptides, also useful in the methods of the invention is a root-specific promoter.

[0426] Concerning SAUR polypeptides, also useful in the methods of the invention is a leaf-specific promoter. Further the promoter useful in the methods of the invention is an Auxin inducible promoter. Preferably said Auxin inducible promoter comprises the well known Auxin response elements TGTCTC and GGTCCCAT as represented by SEQ ID NO: 1151 and 1152, respectively. Examples of promoters inducible by the hormone Auxin are well known in the art, for example promoters of naturally occurring SAUR genes.

[0427] Concerning DHAR polypeptides, also useful in the methods of the invention is a root-specific promoter.

[0428] Concerning GDH polypeptides, it should be clear that the applicability of the present invention is not restricted to the GDH polypeptide-encoding nucleic acid represented by SEQ ID NO: 1, nor is the applicability of the invention restricted to expression of a GDH polypeptide-encoding nucleic acid when driven by a constitutive promoter, or when driven by a root-specific promoter.

[0429] The constitutive promoter is preferably a medium strength promoter, more preferably selected from a plant derived promoter, such as a GOS2 promoter, more preferably the GOS2 promoter is from rice. Further preferably the constitutive promoter is represented by a nucleic acid sequence substantially similar to SEQ ID NO: 23, most preferably the constitutive promoter is as represented by SEQ ID NO: 23. See the “Definitions” section herein for further examples of constitutive promoters.

[0430] According to another preferred feature of the invention, the nucleic acid encoding a GDH polypeptide is operably linked to a root-specific promoter. The root-specific promoter is preferably an RCc3 promoter (Plant Mol Biol. 1995 January; 27(2):237-48), more preferably the RCc3 promoter is from rice, further preferably the RCc3 promoter is represented by a nucleic acid sequence substantially similar to SEQ ID NO: 24, most preferably the promoter is as represented by SEQ ID NO: 24. Examples of other root-specific promoters which may also be used to perform the methods of the invention are shown in Table 3 in the “Definitions” section above.

[0431] Optionally, one or more terminator sequences may be used in the construct introduced into a plant. Preferably, the construct comprises an expression cassette comprising a GOS2 promoter or comprising the RCc3, and the nucleic acid encoding the GDH polypeptide.

[0432] Concerning FLA-like polypeptides, it should be clear that the applicability of the present invention is not restricted to the FLA-like polypeptide-encoding nucleic acid represented by SEQ ID NO: 171, nor is the applicability of the invention restricted to expression of a FLA-like polypeptide-encoding nucleic acid when driven by a constitutive promoter.

[0433] The constitutive promoter is preferably a medium strength promoter, more preferably selected from a plant derived promoter, such as a GOS2 promoter, more preferably the GOS2 promoter is from rice. Further preferably the constitutive promoter is represented by a nucleic acid sequence substantially similar to SEQ ID NO: 500, most preferably the constitutive promoter is as represented by SEQ ID NO: 500. See the “Definitions” section herein for further examples of constitutive promoters.

[0434] According to a preferred feature of the invention, the modulated expression is increased expression. Methods for increasing expression of nucleic acids or genes, or gene products, are well documented in the art and examples are provided in the definitions section.

[0435] It should be clear that the applicability of the present invention is not restricted to the SAUR polypeptide-encoding nucleic acid represented by SEQ ID NO: 501, nor is the applicability of the invention restricted to expression of a SAUR polypeptide-encoding nucleic acid when driven by a constitutive promoter, or when driven by a leaf-specific promoter.

[0436] Further preferably the leaf promoter is represented by a nucleic acid sequence substantially similar to SEQ ID NO: 1163, most preferably the constitutive promoter is as represented by SEQ ID NO: 1163. See the “Definitions” section herein for further examples of leaf promoters.

[0437] The constitutive promoter is preferably a medium strength promoter, more preferably selected from a plant derived promoter, such as a GOS2 promoter, more preferably the GOS2 promoter is from rice.

[0438] According to a preferred feature of the invention, the modulated expression is increased expression. Methods for increasing expression of nucleic acids or genes, or gene products, are well documented in the art and examples are provided in the definitions section.

[0439] Concerning SAUR polypeptides, or SYNP polypeptides, or fusion proteins of SAUR polypeptides and SYNP polypeptides, it should be clear that the applicability of the present invention is not restricted to the SAUR, SYNP polypeptide-, fusions thereof-encoding nucleic acid represented by those of Tables A4, E, and F, nor is the applicability of the invention restricted to expression of a SAUR, SYNP polypeptide-fusions thereof-encoding nucleic acid when driven by a constitutive promoter, or when driven by a leaf-specific promoter.

[0440] The constitutive promoter is preferably a medium strength promoter, more preferably selected from a plant derived promoter, such as a GOS2 promoter, more preferably the GOS2 promoter is from rice.

[0441] Further preferably the leaf promoter is represented by a nucleic acid sequence substantially similar to SEQ ID NO: 1825, most preferably the constitutive promoter is as represented by SEQ ID NO: 1825. See the “Definitions” section herein for further examples of leaf promoters.

[0442] According to a preferred feature of the invention, the modulated expression is increased expression. Methods for increasing expression of nucleic acids or genes, or gene products, are well documented in the art and examples are provided in the definitions section.

[0443] It should be clear that the applicability of the present invention is not restricted to the DHAR polypeptide-encoding nucleic acid represented by SEQ ID NO: 1957, nor is the applicability of the invention restricted to expression of a DHAR polypeptide-encoding nucleic acid when driven by a constitutive promoter.

[0444] The constitutive promoter is preferably a medium strength promoter, more preferably selected from a plant derived promoter, such as a GOS2 promoter, more preferably the GOS2 promoter is from rice. Further preferably the constitutive promoter is represented by a nucleic acid sequence substantially similar to SEQ ID NO: 2251, most preferably the constitutive promoter is as represented by SEQ ID NO: 2251. See the “Definitions” section herein for further examples of constitutive promoters.

[0445] Optionally, one or more terminator sequences may be used in the construct introduced into a plant. Preferably, the construct comprises an expression cassette comprising a GOS2 promoter, substantially similar to SEQ ID NO: 2251, and the nucleic acid encoding the DHAR polypeptide.

[0446] According to a preferred feature of the invention, the modulated expression is increased expression. Methods for increasing expression of nucleic acids or genes, or gene products, are well documented in the art and examples are provided in the definitions section.

[0447] Additional regulatory elements may include transcriptional as well as translational enhancers. Those skilled in the art will be aware of terminator and enhancer sequences that may be suitable for use in performing the invention. An intron sequence may also be added to the 5′ untranslated region (UTR) or in the coding sequence to increase the amount of the mature message that accumulates in the cytosol, as described in the definitions section. Other control sequences (besides promoter, enhancer, silencer, intron sequences, 3′UTR and/or 5′UTR regions) may be protein and/or RNA stabilizing elements. Such sequences would be known or may readily be obtained by a person skilled in the art.

[0448] The genetic constructs of the invention may further include an origin of replication sequence that is required for maintenance and/or replication in a specific cell type. One example is when a genetic construct is required to be maintained in a bacterial cell as an episomal genetic element (e.g. plasmid or cosmid molecule). Preferred origins of replication include, but are not limited to, the f1-ori and colE1.

[0449] For the detection of the successful transfer of the nucleic acid sequences as used in the methods of the invention and/or selection of transgenic plants comprising these nucleic acids, it is advantageous to use marker genes (or reporter genes). Therefore, the genetic construct may optionally comprise a selectable marker gene. Selectable markers are described in more detail in the “definitions” section herein. The marker genes may be removed or excised from the transgenic cell once they are no longer needed. Techniques for marker removal are known in the art, useful techniques are described above in the definitions section.

[0450] As mentioned above, a preferred method for modulating expression of a nucleic acid encoding a a GDH polypeptide, or a FLA polypeptide, or a SAUR polypeptide, or a DHAR polypeptide, is by introducing and expressing in a plant a nucleic acid encoding a a GDH polypeptide, or a FLA polypeptide, or a SAUR polypeptide, or a DHAR polypeptide; however the effects of performing the method, i.e. enhancing yield-related traits may also be achieved using other well known techniques, including but not limited to T-DNA activation tagging, TILLING, homologous recombination. A description of these techniques is provided in the definitions section.

[0451] In order to modulate the expression of the nucleic acid encoding a SAUR polypeptide, said introduced nucleic acid may for example comprise one or more DST elements, said elements preferably comprising the conserved DST motif ATAGAT and GAT (SEQ ID NO: 653 and 654). Preferably the DST elements are located downstream, in the 3′ UTR, of the coding region of nucleic acid encoding a SAUR polypeptide. The DST elements are well known in the art and play an important role in the stability of the transcripts encoding SAUR polypeptides. DST elements refer to approximately 40 nucleotide long elements typically present in the 3′ UTR (untranslated region) of mRNAs and involved in regulating mRNA decay M. A. Perez-Amador, et al., New molecular phenotypes in the dst mutants of Arabidopsis revealed by DNA microarray analysis, Plant Cell 13 (2001) 2703-2717. In a further example the expression of the nucleic acid encoding a SAUR polypeptide may be modulated by modification of DST elements in an endogenous SAUR nucleic acid by for example TILLING.

[0452] As mentioned above, a preferred method for modulating expression of a nucleic acid encoding the polypeptide useful in the methods of the invention is by introducing and expressing in a plant a nucleic acid encoding a SAUR, a SYNP polypeptide or a fusion thereof; however the effects of performing the method, i.e. enhancing yield-related traits may also be achieved using other well known techniques, including but not limited to T-DNA activation tagging, TILLING, homologous recombination. A description of these techniques is provided in the definitions section.

[0453] The invention also provides a method for the production of transgenic plants having enhanced yield-related traits relative to control plants, comprising introduction and expression in a plant of any nucleic acid encoding a GDH polypeptide, or a FLA polypeptide, or a SAUR polypeptide, or a DHAR polypeptide, as defined hereinabove.

[0454] More specifically, the present invention provides a method for the production of transgenic plants having enhanced yield-related traits, particularly increased yield and/or increased early vigour, which method comprises:
[0455] (i) introducing and expressing in a plant or plant cell nucleic acid encoding a GDH polypeptide, or a FLA polypeptide, or a SAUR polypeptide, or a DHAR polypeptide; and
[0456] (ii) cultivating the plant cell under conditions promoting plant growth and development.

[0457] The nucleic acid of (i) may be any of the nucleic acids capable of encoding a GDH polypeptide, or a FLA polypeptide, or a SAUR polypeptide, or a DHAR polypeptide, as defined herein.

[0458] The invention also provides a method for the production of transgenic plants having enhanced yield-related traits relative to control plants, comprising introduction and expression in a plant of any nucleic acid encoding a polypeptide useful in the methods of the invention as defined hereinabove.

[0459] Methods for introducing and expressing two or more trans-genes (also called gene stacking) in transgenic plants are well known in the art (see for example, a review by Halpin (2005) Plant Biotech J (3): 141-155. Gene stacking can proceed by interative steps, where two or more transgenes can be sequentially introduced into a plant by crossing a plant containing one transgene with individuals harbouring other transgenes or, alternatively, by re-transforming (or super-transforming) a plant containing one transgene with new genes. The two or more transgenes may be introduced simultaneously by transformation with for example a culture of mix Agroacterium tumefaciens strains harbouring each of the transgenes of to be introduced in the plant.

[0460] Concerning SAUR polypeptides, or SYNP polypeptides, or fusion proteins of SAUR polypeptides and SYNP polypeptides, according to the present invention, there is also provided a method for enhancing yield-related traits in plants, which method comprises simultaneously introducing and expressing in a plant: (i) a first nucleic acid sequence encoding at least one SAUR polypeptides; and (ii) a second nucleic acid sequence encoding a SYNP polypeptide or (iii) a introducing and expressing a nucleic acid encoding a fusion of a SAUR and a SYNP polypeptide, which plants have enhanced yield-related traits relative to plants having increased expression of one of:
[0461] (i) a first nucleic acid encoding at least a SAUR polypeptide; or
[0462] (ii) a second nucleic acid encoding one or more SYNP polypeptides; or
[0463] (iii) a nucleic acid according to (i) and a nucleic according to (ii), wherein preferably said SAUR polypeptide is selected from the group consisting of any of the polypeptides of Table A and homologues thereof; wherein preferably said SYNP polypeptide is selected from the group consisting of any of the polypeptides of Table E and F.

[0464] The nucleic acid sequences that are simultaneously introduced and expressed, are comprised in one or more nucleic acid molecules. Therefore, according to the present invention is provided increasing yield-related traits in plants, which method comprises simultaneously introducing and expressing in a plant:
[0465] (i) a nucleic acid molecule encoding a SAUR and a SYNP polypeptide; or
[0466] (ii) any two or three nucleic acids, each encoding at least a SAUR or a SYNP polypeptide; or
[0467] (iii) a nucleic acid encoding a fusion of a SAUR and a SYNP polypeptide
   wherein preferably said SAUR polypeptide is selected from the group consisting of any of the polypeptides of Table A and homologues thereof and said SYNP polypeptide is selected from the group consisting of any of the polypeptides of Tables E and F and homologues thereof.

[0468] More specifically, the present invention provides a method for the production of transgenic plants having enhanced yield-related traits, which method comprises:
[0469] (i) introducing and expressing in a plant a first nucleic acid encoding at least a SAUR polypeptide and a second nucleic acid encoding one or more SYNP polypeptides, or a nucleic acid encoding a protein fusion between at least a SAUR and one or more SYNP polypeptides wherein the first and second nucleic acids are comprised in a single nucleic acid molecule or in multiple, at least two, nucleic acid molecules; and
[0470] (ii) cultivating the plant cell under conditions promoting plant growth and development.

[0471] The nucleic acid sequence introduced in the plant is preferably a nucleic acid molecule comprising a nucleic acid sequence encoding fusions of at least one SAUR or a portion thereof and at least one SYNP polypeptide or a portion thereof. Methods to make nucleic acids encoding protein fusions are well known in the art, and include but are not limited to PCR, DNA restriction and ligation. The nucleic acid sequences encoding the SAUR and the SYNP polypeptides may be fused to each other or separated by coding or non-coding DNA, such as promoters, introns, subcellular targeting signal, or stuffed DNA such as the MARs (Matrix attachment Regions) regions. The SAUR encoding part may be at the N-terminus of the fusion protein or vice versa.

[0472] Preferably, the nucleic acid sequences of (i) are sequentially introduced and expressed by crossing. A cross is performed between a female parent plant comprising an introduced and expressed isolated nucleic acid sequence encoding at least one SAUR polypeptide, and a male parent plant also comprising an introduced and expressed isolated nucleic acid sequence encoding one or two SYNP polypeptides, and preferably selecting in the progeny for the presence and expression of both transgenes. Therefore, according to the present invention, there is provided a method for enhancing yield-related traits in plants, by crossing a female or male parent plant comprising an introduced and expressed isolated nucleic acid sequence encoding at least a SAUR polypeptide, and a male or female parent plant comprising an introduced and expressed isolated nucleic acid sequence encoding one or more SYNP polypeptides, and preferably selecting in the progeny for the presence and expression of at least two of the introduced transgenes encoding the corresponding SAUR and SYNP polypeptides, wherein said plants have enhanced yield-related traits relative to the parent plants, or to any other control plants as defined herein.

[0473] The nucleic acid may be introduced directly into a plant cell or into the plant itself (including introduction into a tissue, organ or any other part of a plant). According to a preferred feature of the present invention, the nucleic acid is preferably introduced into a plant by transformation. The term “transformation” is described in more detail in the “definitions” section herein.

[0474] The genetically modified plant cells can be regenerated via all methods with which the skilled worker is familiar. Suitable methods can be found in the above-mentioned publications by S. D. Kung and R. Wu, Potrykus or Höfgen and Willmitzer.

[0475] Generally after transformation, plant cells or cell groupings are selected for the presence of one or more markers which are encoded by plant-expressible genes co-transferred with the gene of interest, following which the transformed material is regenerated into a whole plant. To select transformed plants, the plant material obtained in the transformation is, as a rule, subjected to selective conditions so that transformed plants can be distinguished from untransformed plants. For example, the seeds obtained in the above-described manner can be planted and, after an initial growing period, subjected to a suitable selection by spraying. A further possibility consists in growing the seeds, if appropriate after sterilization, on agar plates using a suitable selection agent so that only the transformed seeds can grow into plants. Alternatively, the transformed plants are screened for the presence of a selectable marker such as the ones described above.

[0476] Following DNA transfer and regeneration, putatively transformed plants may also be evaluated, for instance using Southern analysis, for the presence of the gene of interest, copy number and/or genomic organisation. Alternatively or additionally, expression levels of the newly introduced DNA may be monitored using Northern and/or Western analysis, both techniques being well known to persons having ordinary skill in the art.

[0477] Concerning SAUR polypeptides, or SYNP polypeptides, or fusion proteins of SAUR polypeptides and SYNP polypeptides, alternatively the nucleic acid sequences encoding the polypeptides useful in the methods of the invention are sequentially introduced and expressed by re-transformation. Re-transformation is performed by introducing and expressing a first nucleic acid sequence encoding at least a SAUR polypeptide in a plant part, or plant cell comprising a introduced and expressed nucleic acid sequence encoding one or more SYNP polypeptides, and preferably by selecting in the progeny for the presence and expression of both transgenes; or vice versa introducing the nucleic acid encoding the SYNP polypeptide in the plant already comprising the isolated nucleic acid encoding the SAUR polypeptide. Therefore, according to the present invention, there is provided a method for enhancing yield-related traits in plants, by re-transformation performed by introducing and expressing a nucleic acid sequence encoding at least a SAUR polypeptide into a plant, plant part, or plant cell comprising an introduced and expressed nucleic acid sequence encoding one or more SYNP polypeptides, and by preferably selecting in the progeny for the presence and expression of both transgenes, wherein said plants have enhanced yield-related traits relative to the plants having increased expression of one of:
[0478] (i) a first nucleic acid encoding at least a SAUR polypeptide; or
[0479] (ii) a second nucleic acid encoding one or more SYNP polypeptides; or
[0480] (iii) a nucleic acid according to (i) and a nucleic according to (ii), wherein preferably said SAUR polypeptide is selected from the group consisting of any of the polypeptides of Table A4 and homologues thereof; wherein preferably said SYNP polypeptide is selected from the group consisting of any of the polypeptides of Table E and F.

[0481] Alternatively, gene stacking can occur via simultaneous transformation, or co-transformation, which is faster and can be used in a whole range of transformation techniques, as described in the definitions section herein.

[0482] When direct genetic transformation is considered, using physical or chemical delivery systems (e.g., microprojectile bombardment, PEG, electroporation, liposome, glass needles, etc.), the transgenes (at least two) can also be present in a number of conformations, but essentially do not need to be comprised in a vector capable of being replicated in Agrobacteria or viruses, intermediates of the genetic transformation. The two transgenes can be comprised in one or more nucleic acid molecules, but simultaneously used for the genetic transformation process.

[0483] The generated transformed plants may be propagated by a variety of means, such as by clonal propagation or classical breeding techniques. For example, a first generation (or T1) transformed plant may be selfed and homozygous second-generation (or T2) transformants selected, and the T2 plants may then further be propagated through classical breeding techniques. The generated transformed organisms may take a variety of forms. For example, they may be chimeras of transformed cells and non-transformed cells; clonal transformants (e.g., all cells transformed to contain the expression cassette); grafts of transformed and untransformed tissues (e.g., in plants, a transformed rootstock grafted to an untransformed scion).

[0484] The present invention clearly extends to any plant cell or plant produced by any of the methods described herein, and to all plant parts and propagules thereof. The present invention encompasses plants or parts thereof (including seeds) obtainable by the methods according to the present invention. The plants or parts thereof comprise a nucleic acid transgene encoding a GDH polypeptide, or a FLA polypeptide, or a SAUR polypeptide, or a DHAR polypeptide, as defined above. The present invention extends further to encompass the progeny of a primary transformed or transfected cell, tissue, organ or whole plant that has been produced by any of the aforementioned methods, the only requirement being that progeny exhibit the same genotypic and/or phenotypic characteristic(s) as those produced by the parent in the methods according to the invention.

[0485] Concerning SAUR polypeptides, or SYNP polypeptides, or fusion proteins of SAUR polypeptides and SYNP polypeptides, the present invention clearly extends to any plant cell or plant produced by any of the methods described herein, and to all plant parts and propagules thereof. The present invention encompasses plants or parts thereof (including seeds) obtainable by the methods according to the present invention. The plants or parts thereof comprise a nucleic acid transgene encoding an (isolated) SAUR polypeptide and an (isolated) SYNP polypeptide as defined above. The present invention extends further to encompass the progeny of a primary transformed or transfected cell, tissue, organ or whole plant that has been produced by any of the aforementioned methods, the only requirement being that progeny exhibit the same genotypic and/or phenotypic characteristic(s) as those produced by the parent in the methods according to the invention.

[0486] The invention also includes host cells containing an isolated nucleic acid encoding a GDH polypeptide, or a FLA polypeptide, or a SAUR polypeptide, or a DHAR polypeptide, as defined hereinabove. Preferred host cells according to the invention are plant cells. Host plants for the nucleic acids or the vector used in the method according to the invention, the expression cassette or construct or vector are, in principle, advantageously all plants, which are capable of synthesizing the polypeptides used in the inventive method.

[0487] The methods of the invention are advantageously applicable to any plant. Plants that are particularly useful in the methods of the invention include all plants which belong to the superfamily Viridiplantae, in particular monocotyledonous and dicotyledonous plants including fodder or forage legumes, ornamental plants, food crops, trees or shrubs. According to a preferred embodiment of the present invention, the plant is a crop plant. Examples of crop plants include soybean, sunflower, canola, alfalfa, rapeseed, linseed, cotton, tomato, potato and tobacco. Further preferably, the plant is a monocotyledonous plant. Examples of monocotyledonous plants include sugarcane. More preferably the plant is a cereal. Examples of cereals include rice, maize, wheat, barley, millet, rye, triticale, sorghum, emmer, spelt, secale, einkorn, teff, milo and oats.

[0488] The invention also extends to harvestable parts of a plant such as, but not limited to seeds, leaves, fruits, flowers, stems, roots, rhizomes, tubers and bulbs, which harvestable parts comprise a recombinant nucleic acid encoding a GDH polypeptide, or a FLA polypeptide, or a SAUR polypeptide, or an SYNP polypeptide, or a fusion protein of SAUR polypeptides and SYNP polypeptides, or a DHAR polypeptide. The invention furthermore relates to products derived, preferably directly derived, from a harvestable part of such a plant, such as dry pellets or powders, oil, fat and fatty acids, starch or proteins.

[0489] Concerning SAUR polypeptides, or SYNP polypeptides, or fusion proteins of SAUR polypeptides and SYNP polypeptides, the invention also provides for the use of a construct comprising:
[0490] (i) a first nucleic acid encoding at least a SAUR polypeptide and a second nucleic acid encoding one or more SYNP polypeptides, wherein the first and second nucleic acids are comprised in a single nucleic acid molecule or in multiple, at least two, nucleic acid molecules;
[0491] (ii) one or more control sequences capable of driving expression of the nucleic acid sequence of (i), preferably a plant promoter, more preferably a constitutive promoter, even more preferably a GOS2 promoter, most preferably a GOS2 promoter from rice; and optionally
[0492] (iii) a transcription termination sequence.
   or of a mixture of constructs as described above, in a method for making plants having enhanced yield-related traits relative to plants having increased expression of one of the nucleic acids encoding the corresponding SAUR and SYNP polypeptides which increased yield-related traits are one or more of: (i) increased early vigour; (ii) increased aboveground biomass or root biomass; (iii) increased total seed yield per plant; (iv) increased seed filling rate; (v) increased number of (filled) seeds; (vi) increased harvest index; or (vii) increased thousand kernel weight (TKW).

[0493] The present invention also encompasses use of nucleic acids encoding GDH polypeptides, or FLA polypeptides, or SAUR polypeptides, or SYNP polypeptides, or fusion proteins of SAUR polypeptides and SYNP polypeptides, or DHAR polypeptides, as described herein and use of these GDH polypeptides, or FLA polypeptides, or SAUR polypeptides, or SYNP polypeptides, or fusion proteins of SAUR polypeptides and SYNP polypeptides, or DHAR polypeptides, in enhancing any of the aforementioned yield-related traits in plants. For example, nucleic acids encoding GDH polypeptides, or FLA polypeptides, or SAUR polypeptides, or SYNP polypeptides, or fusion proteins of SAUR polypeptides and SYNP polypeptides, or DHAR polypeptides, described herein, or the GDH polypeptides, or FLA polypeptides, or SAUR polypeptides, or SYNP polypeptides, or fusion proteins of SAUR polypeptides and SYNP polypeptides, or DHAR polypeptides, themselves, may find use in breeding programmes in which a DNA marker is identified which may be genetically linked to gene encoding GDH polypeptides, or FLA polypeptides, or SAUR polypeptides, or SYNP polypeptides, or fusion proteins of SAUR polypeptides and SYNP polypeptides, or DHAR polypeptides. The nucleic acids/genes, or the GDH polypeptides, or FLA polypeptides, or SAUR polypeptides, or SYNP polypeptides, or fusion proteins of SAUR polypeptides and SYNP polypeptides, or DHAR polypeptides, themselves may be used to define a molecular marker. This DNA or protein marker may then be used in breeding programmes to select plants having enhanced yield-related traits as defined hereinabove in the methods of the invention. Furthermore, allelic variants of a nucleic acid/gene encoding GDH polypeptides, or FLA polypeptides, or SAUR polypeptides, or SYNP polypeptides, or fusion proteins of SAUR polypeptides and SYNP polypeptides, or DHAR polypeptides, may find use in marker-assisted breeding programmes. Nucleic acids encoding GDH polypeptides, or FLA polypeptides, or SAUR polypeptides, or SYNP polypeptides, or fusion proteins of SAUR polypeptides and SYNP polypeptides, or DHAR polypeptides, may also be used as probes for genetically and physically mapping the genes that they are a part of, and as markers for traits linked to those genes. Such information may be useful in plant breeding in order to develop lines with desired phenotypes.

[0494] Concerning SAUR polypeptides, or SYNP polypeptides, or fusion proteins of SAUR polypeptides and SYNP polypeptides, encompassed within the invention are the following described embodiments:
[0495] Item 1. An isolated SAUR-based protein complex, comprising at least a SAUR polypeptide selected from the group of polypeptides of Table A and homologues and portions thereof and one or more SYNP polypeptides selected from the group of Tables E and F and homologues and portions thereof.
[0496] Item 2. A nucleic acid comprising a sequence encoding the proteins of the complex of item 1.
[0497] Item 3. The use of a protein complex according to item 1 to enhance yield-related traits.
[0498] Item 4. The use of a nucleic acid according to item 2 to enhance yield-related traits.
[0499] Item 5. A method to promote SAUR-based protein complex formation by simultaneous overexpression of at least two proteins of the complex.
[0500] Item 6. A method to enhance yield related traits modulating levels and or activity of a SAUR-base protein complex, said complex comprising at least one SAUR polypeptide and one SYNP polypeptide, by modulating one or more nucleic acids comprising the coding region of a SAUR polypeptide, homologue or portion thereof and the coding region of a SYNP polypeptide, homologue or portion thereof.

### Items

### 1. Glutamate Dehydrogenase (GDH) Polypeptides

[0501] 1. A method for enhancing yield-related traits in plants relative to control plants, comprising modulating expression in a plant of a nucleic acid encoding a glutamate dehydrogenase (GDH) polypeptide, wherein said GDH polypeptide is a NAD-dependent GDH having glutamate dehydrogenase activity.
[0502] 2. Method according to item 1, wherein said GDH polypeptide comprises one or more of the motifs 1 to 20 (SEQ ID NO: 3 to SEQ ID NO: 22).
[0503] 3. Method according to item 1 or 2, wherein said modulated expression is effected by introducing and expressing in a plant a nucleic acid encoding a GDH polypeptide.
[0504] 4. Method according to any one of items 1 to 3, wherein said nucleic acid encoding a GDH polypeptide encodes any one of the proteins listed in Table A1 or is a portion of such a nucleic acid, or a nucleic acid capable of hybridising with such a nucleic acid.
[0505] 5. Method according to any one of items 1 to 4, wherein said nucleic acid sequence encodes an orthologue or paralogue of any of the proteins given in Table A1.
[0506] 6. Method according to any preceding item, wherein said enhanced yield-related traits comprise increased yield, preferably increased biomass, increased early vigour and/or increased seed yield relative to control plants.
[0507] 7. Method according to any one of items 1 to 6, wherein said enhanced yield-related traits are obtained under non-stress conditions.
[0508] 8. Method according to any one of items 1 to 6, wherein said enhanced yield-related traits are obtained under conditions of nitrogen deficiency.
[0509] 9. Method according to any one of items 3 to 8, wherein said nucleic acid is operably linked to one of
   [0510] (i) a constitutive promoter, preferably to a GOS2 promoter, most preferably to a GOS2 promoter from rice;
   [0511] (ii) a root specific promoter, preferably a RCc3 promoter, most preferably a RCc3 promoter from rice.
[0512] 10. Method according to any one of items 1 to 9, wherein said nucleic acid encoding a GDH polypeptide is of plant origin, preferably from a dicotyledonous plant, further preferably from the family Poaceae, more preferably from the genus Zea or Oryza, most preferably from maize or rice.
[0513] 11. Plant or part thereof, including seeds, obtainable by a method according to any one of items 1 to 10, wherein said plant or part thereof comprises a recombinant nucleic acid encoding a GDH polypeptide.
[0514] 12. Construct comprising:
   [0515] (i) nucleic acid encoding a GDH polypeptide as defined in items 1 or 2;
   [0516] (ii) one or more control sequences capable of driving expression of the nucleic acid sequence of (a); and optionally
   [0517] (iii) a transcription termination sequence.
[0518] 13. Construct according to item 12, wherein one of said control sequences is one of
   [0519] (i) a constitutive promoter, preferably a GOS2 promoter, most preferably a GOS2 promoter from rice;
   [0520] (ii) a root specific promoter, preferably a RCc3 promoter, most preferably a RCc3 promoter from rice.
[0521] 14. Use of a construct according to item 12 or 13 in a method for making plants having increased yield, particularly increased biomass, increased early vigour and/or increased seed yield relative to control plants.
[0522] 15. Plant, plant part or plant cell transformed with a construct according to item 12 or 13.
[0523] 16. Method for the production of a transgenic plant having increased yield, particularly increased biomass, increased early vigour and/or increased seed yield relative to control plants, comprising:
   [0524] 1. introducing and expressing in a plant a nucleic acid encoding a GDH polypeptide as defined in item 1 or 2; and
   [0525] 2. cultivating the plant cell under conditions promoting plant growth and development.
[0526] 17. Transgenic plant having increased yield, particularly increased biomass, increased early vigour and/or increased seed yield, relative to control plants, resulting from modulated expression of a nucleic acid encoding a GDH polypeptide as defined in item 1 or 2, or a transgenic plant cell derived from said transgenic plant.
[0527] 18. Transgenic plant according to item 11, 15 or 17, or a transgenic plant cell derived thereof, wherein said plant is a crop plant or a monocot or a cereal, such as rice, maize, wheat, barley, millet, rye, triticale, sorghum emmer, spelt, secale, einkorn, teff, milo and oats.
[0528] 19. Harvestable parts of a plant according to item 18, wherein said harvestable parts are preferably shoot biomass, root biomass and/or seeds.
[0529] 20. Products derived from a plant according to item 18 and/or from harvestable parts of a plant according to item 19.
[0530] 21. Use of a nucleic acid encoding a GDH polypeptide in increasing yield, particularly in increasing seed yield, early vigour and/or biomass in plants, relative to control plants.
[0531] 22. An isolated nucleic acid molecule comprising:
   [0532] (a) a nucleic acid represented by SEQ ID NO: 99;
   [0533] (b) the complement of a nucleic acid represented by SEQ ID NO: 99;
   [0534] (c) at least 50%, 55%, 60%, 65%, 70%, 75%, 80%, 85%, 90%, 95%, 96%, 97%, 98%, 99% or more sequence identity to the amino acid sequence represented by SEQ ID NO: 176, and having in increasing order of preference at least 50%, 55%, 60%, 65%, 70%, 75%, 80%, 85%, 90%, 95%, 96%, 97%, 98%, 99% or more sequence identity to any one of the motifs 4 to 6.
[0535] 23. An isolated polypeptide comprising:
   [0536] (i) an amino acid sequence represented by SEQ ID NO: 176;
   [0537] (ii) an amino acid sequence having, in increasing order of preference, at least 50%, 55%, 60%, 65%, 70%, 75%, 80%, 85%, 90%, 95%, 96%, 97%, 98%, 99% or more sequence identity to the amino acid sequence represented by SEQ ID NO: 176, and having in increasing order of preference at least 50%, 55%, 60%, 65%, 70%, 75%, 80%, 85%, 90%, 95%, 96%, 97%, 98%, 99% or more sequence identity to any one of the motifs 4 to 6;
   [0538] 3. derivatives of any of the amino acid sequences given in (i) or (ii) above.

### 2. Fasciclin-Like AGP (FLAB) Polypeptides

[0539] 1. A method for enhancing yield-related traits in plants relative to control plants, comprising modulating expression in a plant of a nucleic acid encoding a polypeptide encoding a Fasciclin-like (FLA-like) polypeptide.
[0540] 2. Method according to item 1, wherein said FLA-like polypeptide comprises at least one, two, three, or four fasciclin-like domains having in increasing order of preference at least 25%, 26%, 27%, 28%, 29%, 30%, 31%, 32%, 33%, 34%, 35%, 36%, 37%, 38%, 39%, 40%, 41%, 42%, 43%, 44%, 45%, 46%, 47%, 48%, 49%, 50%, 51%, 52%, 53%, 54%, 55%, 56%, 57%, 58%, 59%, 60%, 61%, 62%, 63%, 64%, 65%, 66%, 67%, 68%, 69%, 70%, 71%, 72%, 73%, 74%, 75%, 76%, 77%, 78%, 79%, 80%, 81%, 82%, 83%, 84%, 85%, 86%, 87%, 88%, 89%, 90%, 91%, 92%, 93%, 94%, 95%, 96%, 97%, 98%, or 99% sequence identity to the amino acid represented by:
   [0541] (i) TITVCAVDNAGMSDLLSKQLSIYTIKNVLSFRVLLDYFDAKKLHQITNGTALAATM FQATGSATGSSGFVNITDLRGGKVGLSPADYNGPPPAKFVKSIAEIPYNISVIQIS TIL (SEQ ID NO: 487) which corresponds to the N-term FLA_like domain in SEQ ID NO: 172; or
   [0542] (ii) VDGGVTIFCPRDDAMKKFLPKFKNLTAEGKQSLLEYHGIPIYQSISNLKSNNGD MNTLATDGAKKYAVVIQNDGEDVTIKTKIVTAKITATVVDKLPLAIYSLDKVL (SEQ ID NO: 488) which corresponds to the C-term FLA_like domain in SEQ ID NO: 172.
[0543] 3. Method according to item 1 or 2, wherein said modulated expression is effected by introducing and expressing in a plant a nucleic acid encoding a FLA-like polypeptide.
[0544] 4. Method according to any one of items 1 to 3, wherein said nucleic acid encoding a FLA-like polypeptide encodes any one of the proteins listed in Table A2 or is a portion of such a nucleic acid, or a nucleic acid capable of hybridising with such a nucleic acid.
[0545] 5. Method according to any one of items 1 to 4, wherein said nucleic acid sequence encodes an orthologue or paralogue of any of the proteins given in Table A2.
[0546] 6. Method according to any preceding item, wherein said enhanced yield-related traits comprise increased yield preferably increased biomass and/or increased seed yield relative to control plants.
[0547] 7. Method according to any one of items 1 to 6, wherein said enhanced yield-related traits are obtained under drought conditions.
[0548] 8. Method according to any one of items 1 to 6, wherein said enhanced yield-related traits are obtained under non-stress or under nitrogen deficiency.
[0549] 9. Method according to any one of items 3 to 8, wherein said nucleic acid is operably linked to a constitutive promoter, preferably to a GOS2 promoter, most preferably to a GOS2 promoter from rice.
[0550] 10. Method according to any one of items 1 to 9, wherein said nucleic acid encoding a FLA-like polypeptide is of plant origin, preferably from a dicotyledonous plant, further preferably from the family solanaceae, more preferably from the genus Lycopersicum, most preferably from Lycopersicum esculentum.
[0551] 11. Plant or part thereof, including seeds, obtainable by a method according to any one of items 1 to 10, wherein said plant or part thereof comprises a recombinant nucleic acid encoding a FLA-like polypeptide.
[0552] 12. Construct comprising:
   [0553] (i) nucleic acid encoding a FLA-like polypeptide as defined in items 1 or 2;
   [0554] (ii) one or more control sequences capable of driving expression of the nucleic acid sequence of (a); and optionally
   [0555] (iii) a transcription termination sequence.
[0556] 13. Construct according to item 12, wherein one of said control sequences is a constitutive promoter, preferably a GOS2 promoter, most preferably a GOS2 promoter from rice.
[0557] 14. Use of a construct according to item 12 or 13 in a method for making plants having increased yield, particularly increased biomass and/or increased seed yield relative to control plants.
[0558] 15. Plant, plant part or plant cell transformed with a construct according to item 12 or 13.
[0559] 16. Method for the production of a transgenic plant having increased yield, particularly increased biomass and/or increased seed yield relative to control plants, comprising:
   [0560] (i) introducing and expressing in a plant a nucleic acid encoding a FLA-like polypeptide as defined in item 1 or 2; and
   [0561] (ii) cultivating the plant cell under conditions promoting plant growth and development.
[0562] 17. Transgenic plant having increased yield, particularly increased biomass and/or increased seed yield, relative to control plants, resulting from modulated expression of a nucleic acid encoding a FLA-like polypeptide as defined in item 1 or 2, or a transgenic plant cell derived from said transgenic plant.
[0563] 18. Transgenic plant according to item 11, 15 or 17, or a transgenic plant cell derived thereof, wherein said plant is a crop plant or a monocot or a cereal, such as rice, maize, wheat, barley, millet, rye, triticale, sorghum emmer, spelt, secale, einkorn, teff, milo and oats.
[0564] 19. Harvestable parts of a plant according to item 18, wherein said harvestable parts are preferably shoot biomass and/or seeds.
[0565] 20. Products derived from a plant according to item 18 and/or from harvestable parts of a plant according to item 19.
[0566] 21. Use of a nucleic acid encoding a FLA-like polypeptide in increasing yield, particularly in increasing seed yield and/or shoot biomass in plants, relative to control plants.

### 3. Small Auxin-Up RNA (SAUR) Polypeptides

[0567] 1. A method for enhancing yield-related traits in plants relative to control plants, comprising modulating expression in a plant of a nucleic acid encoding a SAUR polypeptide, wherein said SAUR polypeptide comprises an Auxin inducible domain.
[0568] 2. Method according to item 1, wherein said SAUR polypeptide comprises one or more of the following motifs:

(i)
Motif 23:
(SEQ ID NO: 1155)
LAVYVGEMMQKRRFVVPVTYLSHPCFQKLLRKAEEEFGFDHPMGGLTI
PC;
(ii)
Motif 24:
(SEQ ID NO: 1156)
KHxxGVYTAEKxxYxxxIxxxxxxxxxAxxxxS xxxYxxxxPMPIx
LxxC;
(iii)
Motif 25:
(SEQ ID NO: 1157)
LQSSKQLLKSLSHSSNNVAIP;
(iv)
Motif 26:
(SEQ ID NO: 1158)
VxxxKIAxKSQ;
(v)
Motif 27:
(SEQ ID NO: 1159)
EQIFIDLASRL;
(vi)
Motif 28:
(SEQ ID NO: 1159)
VExxxVxxxxL;

[0569] Wherein X represents any amino acid.
[0570] 3. Method according to item 1, wherein said SAUR polypeptide is a SAUR33-like polypeptide and comprises the following Motifs 47 and 48 and optionally also one or both of Motifs 49 and 50 or any sequence having in increasing order of preference at least 50%, 51%, 52%, 53%, 54%, 55%, 56%, 57%, 58%, 59%, 60%, 61%, 62%, 63%, 64%, 65%, 66%, 67%, 68%, 69%, 70%, 71%, 72%, 73%, 74%, 75%, 76%, 77%, 78%, 79%, 80%, 81%, 82%, 83%, 84%, 85%, 86%, 87%, 88%, 89%, 90%, 91%, 92%, 93%, 94%, 95%, 96%, 97%, 98%, 99% or 100% sequence identity to Motifs 47 to 50

Motif 47
(SEQ ID NO: 2284)
CEVVLFEHLLWMLENADPQ
Motif 48
(SEQ ID NO: 2285)
PESLDELVEYYAC
Motif 49
(SEQ ID NO: 2286)
GLSKLRCMIRRWHSSSRI
Motif 50
(SEQ ID NO: 2287)
SFHGADEVPKGLHPVYVGKSRRRYLIAEELVGHPLFQNLVDRT

[0571] 4. Method according to any one of items 1 to 3, wherein said modulated expression is effected by introducing and expressing in a plant a nucleic acid encoding a SAUR polypeptide.
[0572] 5. Method according to any one of items 1 to 4, wherein said nucleic acid encoding a SAUR polypeptide encodes any one of the proteins listed in Table A3 or A3(i) or is a portion of such a nucleic acid, or a nucleic acid capable of hybridising with such a nucleic acid.
[0573] 6. Method according to any one of items 1 to 5, wherein said nucleic acid sequence encodes an orthologue or paralogue of any of the proteins given in Table A3 or A3(i).
[0574] 7. Method according to any preceding item, wherein said enhanced yield-related traits comprise any one or more of increased yield, increased early vigour, increased biomass and increased seed yield relative to control plants.
[0575] 8. Method according to any one of items 1 to 7, wherein said enhanced yield-related traits are obtained under non-stress conditions.
[0576] 9. Method according to any one of items 1 to 8, wherein said enhanced yield-related traits are obtained under conditions of drought stress, salt stress or nitrogen deficiency.
[0577] 10. Method according to any one of items 4 to 9, wherein said nucleic acid is operably linked to a constitutive promoter, preferably to a leaf specific promoter, most preferably to the promoter represented by SEQ ID NO: 1163.
[0578] 11. Method according to any one of items 1 to 9, wherein said nucleic acid encoding a SAUR polypeptide is of plant origin, preferably from a dicotyledonous plant, further preferably from the family Brassicaceae, more preferably from the genus Arabidopsis, most preferably from Arabidopsis thaliana.
[0579] 12. Plant or part thereof, including seeds, obtainable by a method according to any one of items 1 to 11, wherein said plant or part thereof comprises a recombinant nucleic acid encoding a SAUR polypeptide.
[0580] 13. Construct comprising:
   [0581] (i) nucleic acid encoding a SAUR polypeptide as defined in items 1 to 3;
   [0582] (ii) one or more control sequences capable of driving expression of the nucleic acid sequence of (a); and optionally
   [0583] (iii) a transcription termination sequence.
[0584] 14. Construct according to item 13, wherein one of said control sequences is a constitutive promoter, preferably a leaf specific promoter, most preferably a promoter represented by SEQ ID NO: 1163.
[0585] 15. Use of a construct according to item 13 or 14 in a method for making plants having increased yield, particularly increased biomass and/or increased seed yield relative to control plants.
[0586] 16. Plant, plant part or plant cell transformed with a construct according to item 13 or 14.
[0587] 17. Method for the production of a transgenic plant having increased yield, particularly increased biomass and/or increased seed yield relative to control plants, comprising:
   [0588] (i) introducing and expressing in a plant a nucleic acid encoding a SAUR polypeptide as defined in item 1 to 3; and
   [0589] (ii) cultivating the plant cell under conditions promoting plant growth and development.
[0590] 18. Transgenic plant having increased yield, particularly increased biomass and/or increased seed yield, relative to control plants, resulting from modulated expression of a nucleic acid encoding a SAUR polypeptide as defined in item 1 to 3, or a transgenic plant cell derived from said transgenic plant.
[0591] 19. Transgenic plant according to item 12, 16 or 18, or a transgenic plant cell derived thereof, wherein said plant is a crop plant or a monocot or a cereal, such as rice, maize, wheat, barley, millet, rye, triticale, sorghum emmer, spelt, secale, einkorn, teff, milo and oats.
[0592] 20. Harvestable parts of a plant according to item 18, wherein said harvestable parts are preferably shoot biomass and/or seeds.
[0593] 21. Products derived from a plant according to item 19 and/or from harvestable parts of a plant according to item 20.
[0594] 22. Use of a nucleic acid encoding a SAUR polypeptide in increasing yield, particularly in increasing seed yield and/or shoot biomass in plants, relative to control plants.

### 4. SAUR Polypeptides, or SYNP Polypeptides, or Fusion Proteins of SAUR Polypeptides and SYNP Polypeptides

[0595] 1. A method for enhancing yield-related traits in plants relative to control plants, comprising modulating expression in a plant of a first nucleic acid encoding at least a SAUR polypeptide and a second nucleic acid encoding one or more SYNP polypeptides, or a nucleic acid encoding a protein fusion between at least a SAUR and one or more SYNP polypeptides wherein the first and second nucleic acids are comprised in a single nucleic acid molecule or in multiple, at least two, nucleic acid molecules.
[0596] 2. A method according to item 1 wherein
   [0597] (i) the SAUR polypeptide useful in the method in the invention has in increasing order of preference at least 25%, 26%, 27%, 28%, 29%, 30%, 31%, 32%, 33%, 34%, 35%, 36%, 37%, 38%, 39%, 40%, 41%, 42%, 43%, 44%, 45%, 46%, 47%, 48%, 49%, 50%, 51%, 52%, 53%, 54%, 55%, 56%, 57%, 58%, 59%, 60%, 61%, 62%, 63%, 64%, 65%, 66%, 67%, 68%, 69%, 70%, 71%, 72%, 73%, 74%, 75%, 76%, 77%, 78%, 79%, 80%, 81%, 82%, 83%, 84%, 85%, 86%, 87%, 88%, 89%, 90%, 91%, 92%, 93%, 94%, 95%, 96%, 97%, 98%, 99% or 100% overall sequence identity to the amino acid represented by any one of the polypeptide sequences of Table A4, more preferably by SEQ ID NO: 1164 or a variant thereof;
   [0598] (ii) the SYNP polypeptide useful in the method in the invention has in increasing order of preference at least 25%, 26%, 27%, 28%, 29%, 30%, 31%, 32%, 33%, 34%, 35%, 36%, 37%, 38%, 39%, 40%, 41%, 42%, 43%, 44%, 45%, 46%, 47%, 48%, 49%, 50%, 51%, 52%, 53%, 54%, 55%, 56%, 57%, 58%, 59%, 60%, 61%, 62%, 63%, 64%, 65%, 66%, 67%, 68%, 69%, 70%, 71%, 72%, 73%, 74%, 75%, 76%, 77%, 78%, 79%, 80%, 81%, 82%, 83%, 84%, 85%, 86%, 87%, 88%, 89%, 90%, 91%, 92%, 93%, 94%, 95%, 96%, 97%, 98%, 99% or 100% overall sequence identity to the amino acid represented by any one of the polypeptide sequences of Table E or Table F.
[0599] 3. Method according to items 1 or 2, wherein said modulated expression is effected by introducing and expressing in a plant a first nucleic acid encoding at least a SAUR polypeptide and a second nucleic acid encoding one or more SYNP polypeptides, or a nucleic acid encoding a protein fusion between at least a SAUR and one or more SYNP polypeptides wherein the first and second nucleic acids are comprised in a single nucleic acid molecule or in multiple, at least two, nucleic acid molecules.
[0600] 4. Method according to any preceding item, wherein said enhanced yield-related traits comprise increased yield, preferably increased biomass and/or increased seed yield relative to control plants.
[0601] 5. Method according to any preceding item, wherein said enhanced yield-related traits are obtained under non-stress conditions.
[0602] 6. Method according to any preceding item, wherein said enhanced yield-related traits are obtained under conditions of drought stress, salt stress or nitrogen deficiency.
[0603] 7. Method according to any one of items 3 to 6, wherein said one or more said nucleic acids are operably linked to a plant promoter, preferably to a constitutive promoter, more preferably to a GOS2 promoter, most preferably to a GOS2 promoter from rice.
[0604] 8. Method according to any preceding item, wherein said one or more said nucleic acids is of plant origin, preferably from a dicotyledonous plant, further preferably from the family Brassicaceae, more preferably from the genus Arabidopsis, most preferably from Arabidopsis thaliana.
[0605] 9. Plant or part thereof, including seeds, obtainable by a method according to any preceding item, wherein said plant or part thereof comprises:
   [0606] (i) a first nucleic acid encoding at least a SAUR polypeptide, preferably selected from the polypeptides of Table A4 or a homologue or derivative thereof; and
   [0607] (ii) a second nucleic acid encoding one or more SYNP polypeptides, preferably selected from the polypeptides of Tables E and F or a homologue or derivative thereof; or
   [0608] (iii) a nucleic acid encoding a protein fusion between any two polypeptides of (i) and (ii);
      wherein the first and second nucleic acids are comprised in a single nucleic acid molecule or in multiple, at least two, nucleic acid molecules.
[0609] 10. Construct comprising:
   [0610] (i) a first nucleic acid encoding at least a SAUR polypeptide and a second nucleic acid encoding one or more SYNP polypeptides, wherein the first and second nucleic acids are comprised in a single nucleic acid molecule or in multiple, at least two, nucleic acid molecules;
   [0611] (ii) one or more control sequences capable of driving expression of the nucleic acid sequence of (i), preferably a plant promoter, more preferably a constitutive promoter, even more preferably a GOS2 promoter, most preferably a GOS2 promoter from rice; and optionally
   [0612] (iii) a transcription termination sequence.
[0613] 11. Use of a construct according to item 10 in a method for making plants having increased yield, particularly increased biomass and/or increased seed yield relative to control plants.
[0614] 12. Plant, plant part or plant cell transformed with a construct according to item 11.
[0615] 13. Method for the production of a transgenic plant having increased yield, particularly increased biomass and/or increased seed yield relative to control plants, comprising:
   [0616] (i) introducing and expressing in a plant a first nucleic acid encoding at least a SAUR polypeptide and a second nucleic acid encoding one or more SYNP polypeptides, or a nucleic acid encoding a protein fusion between at least a SAUR and one or more SYNP polypeptides wherein the first and second nucleic acids are comprised in a single nucleic acid molecule or in multiple, at least two, nucleic acid molecules; and
   [0617] (ii) cultivating the plant cell under conditions promoting plant growth and development.
[0618] 14. Transgenic plant having increased yield, particularly increased biomass and/or increased seed yield, relative to control plants, resulting from modulated expression of a first nucleic acid encoding at least a SAUR polypeptide and a second nucleic acid encoding one or more SYNP polypeptides, or a nucleic acid encoding a protein fusion between at least a SAUR and one or more SYNP polypeptides wherein the first and second nucleic acids are comprised in a single nucleic acid molecule or in multiple, at least two, nucleic acid molecules or a transgenic plant cell derived from said transgenic plant.
[0619] 15. Transgenic plant according to item 9, 12 or 14, or a transgenic plant cell derived thereof, wherein said plant is a crop plant or a monocot or a cereal, such as rice, maize, wheat, barley, millet, rye, triticale, sorghum emmer, spelt, secale, einkorn, teff, milo and oats.
[0620] 16. Harvestable parts of a plant according to item 15, wherein said harvestable parts are preferably shoot biomass and/or seeds.
[0621] 17. Products derived from a plant according to item 14 or 15 and/or from harvestable parts of a plant according to item 16.
[0622] 18. Use of any one, two or more nucleic acids according to item 1 in increasing yield, particularly in increasing seed yield and/or shoot biomass in plants, relative to control plants.

### 5. Dehydroascorbate Reductase (DHAR) Polypeptides

[0623] 1. A method for enhancing yield-related traits in plants relative to control plants, comprising modulating expression in a plant of a nucleic acid encoding a DHAR polypeptide, wherein said polypeptide comprising at least a dehydroascorbate reductase domain with an accession number PTHR11260:SF15.
[0624] 2. Method according to item 1, wherein the DHAR domain the DHAR polypeptide has at least, in increasing order of preference, 49%, 50%, 51%, 52%, 53%, 54%, 55%, 56%, 57%, 58%, 59%, 60%, 61%, 62%, 63%, 64%, 65%, 66%, 67%, 68%, 69%, 70%, 71%, 72%, 73%, 74%, 75%, 76%, 77%, 78%, 79%, 80%, 81%, 82%, 83%, 84%, 85%, 86%, 87%, 88%, 89%, 90%, 91%, 92%, 93%, 94%, 95%, 96%, 97%, 98%, or 99% or more sequence identity to the sequence located between amino acid 19 and 210 of SEQ ID NO 1958.
[0625] 3. Method according to item 1, wherein said DHAR polypeptide comprises motifs having at least, in increasing order of preference 49%, 50%, 51%, 52%, 53%, 54%, 55%, 56%, 57%, 58%, 59%, 60%, 61%, 62%, 63%, 64%, 65%, 66%, 67%, 68%, 69%, 70%, 71%, 72%, 73%, 74%, 75%, 76%, 77%, 78%, 79%, 80%, 81%, 82%, 83%, 84%, 85%, 86%, 87%, 88%, 89%, 90%, 91%, 92%, 93%, 94%, 95%, 96%, 97%, 98%, or 99% or more sequence identity to anyone of the following motifs:

(i)
Motif 35:
(SEQ ID NO: 2239)
P[DN]KLGDCPF[SC]QRVLLTLEEK[KH][VL]PY[KD][ML][KH]
L[IV];
(ii)
Motif 36:
(SEQ ID NO: 2240)
D[DEG]KW[VI][PAS]DSDVI[TV][QG][IL][LI]EEK[YF]PEP
[SP]L[VA]TPPE,
(iii)
Motif 37:
(SEQ ID NO: 2241)
P[FY][IV][NA]GE[KN][IV][ST]A[VA]DLSL[AG]PKLYHLE
[VI]ALGH[FY]K[KN]W[ST][VI]P

[0626] 4. Method, according to any of the items 1 to 3, wherein said DHAR polypeptide comprises any one or more sequence motifs having at least, in increasing order of preference 49%, 50%, 51%, 52%, 53%, 54%, 55%, 56%, 57%, 58%, 59%, 60%, 61%, 62%, 63%, 64%, 65%, 66%, 67%, 68%, 69%, 70%, 71%, 72%, 73%, 74%, 75%, 76%, 77%, 78%, 79%, 80%, 81%, 82%, 83%, 84%, 85%, 86%, 87%, 88%, 89%, 90%, 91%, 92%, 93%, 94%, 95%, 96%, 97%, 98%, or 99% or more sequence identity to anyone of the following motifs:

(i)
Motif 38:
(SEQ ID NO: 2242)
E[VI]CVKA[AS]V[GT]AP[DN][KV]LGDCPF[SC]QRVLLTLEE,
(ii)
Motif 39:
(SEQ ID NO: 2243)
PPE[FK]ASVGSKIF[PS][TS]F[VI][GT]FLKSKD[PA][NS]D
G[TS]EQ,
(iii)
Motif 40:
(SEQ ID NO: 2243)
[IV][ST]A[VA]DLSL[AG]PKLYHL[EQ][VI]ALGH[FY]K[KN]
W[ST][VI]P[ED]SL[TP]HV[HK][NS]Y[MT]K[ALS][LI]FS
[RL][ED]SF[EV]KT

[0627] 5. Method, according to any of the items 1 to 4, wherein said DHAR polypeptide comprises any one or more of the following sequence motifs having at least, in increasing order of preference 49%, 50%, 51%, 52%, 53%, 54%, 55%, 56%, 57%, 58%, 59%, 60%, 61%, 62%, 63%, 64%, 65%, 66%, 67%, 68%, 69%, 70%, 71%, 72%, 73%, 74%, 75%, 76%, 77%, 78%, 79%, 80%, 81%, 82%, 83%, 84%, 85%, 86%, 87%, 88%, 89%, 90%, 91%, 92%, 93%, 94%, 95%, 96%, 97%, 98%, or 99% or more sequence identity to anyone of the following motifs:

(i)
Motif 41:
(SEQ ID NO: 2244)
E[IV]CVKAA[VT]GAPD[VIT]LGDCPF[SC]QRVLLTLEE,
(ii)
Motif 42:
(SEQ ID NO: 2245)
PPE[FY]ASVGSKIF[PG][ST]FV[TK]FLKSKD[AP][NS]DG
[TS]E[QK]
(iii)
Motif 43:
(SEQ ID NO: 2246)
[IV][TS]AVDLSLAPKLYHL[EQ]VAL[GE]HFK[KG]W[TSK]
[VI]PE[SN]LTHVH[NA]Y[TM]K[LAS]LFSRESFEKT.

[0628] 6. Method, according to any of the items 1 to 4, wherein said DHAR polypeptide comprises any one or more of the following sequence motifs having at least, in increasing order of preference 49%, 50%, 51%, 52%, 53%, 54%, 55%, 56%, 57%, 58%, 59%, 60%, 61%, 62%, 63%, 64%, 65%, 66%, 67%, 68%, 69%, 70%, 71%, 72%, 73%, 74%, 75%, 76%, 77%, 78%, 79%, 80%, 81%, 82%, 83%, 84%, 85%, 86%, 87%, 88%, 89%, 90%, 91%, 92%, 93%, 94%, 95%, 96%, 97%, 98%, or 99% or more sequence identity to anyone of the following motifs:

(i)
Motif 44:
(SEQ ID NO: 2247)
PLE[VI]C[VA]KAS[ILV]T[TV]P[ND][KR]LGDCPF[TC]QRVLL
TLEEKHLPY[DE][ML]KLVDL[SG]NKP[ED]WF,
(ii)
Motif 45:
(SEQ ID NO: 2248)
PPE[VI][PA]DSDVITQ[AST]LEEK[YF]P[ED]P[PS]L[AV]TPP
EKASVGSKIFSTF[IV]GFLKSKDP[SN]DG,
(iii)
Motif 46:
(SEQ ID NO: 2249)
QALL[ND]EL[ST][SA]FNDY[LI]KENGPFING[KE][KDE][IV]
SAADLSL[GA]PKLYH[LM]EIALGH[YF]K[NK]W.

[0629] 7. Method, according to any of the items 1 to 6, wherein the DHAR polypeptide has in increasing order of preference at least 25%, 26%, 27%, 28%, 29%, 30%, 31%, 32%, 33%, 34%, 35%, 36%, 37%, 38%, 39%, 40%, 41%, 42%, 43%, 44%, 45%, 46%, 47%, 48%, 49%, 50%, 51%, 52%, 53%, 54%, 55%, 56%, 57%, 58%, 59%, 60%, 61%, 62%, 63%, 64%, 65%, 66%, 67%, 68%, 69%, 70%, 71%, 72%, 73%, 74%, 75%, 76%, 77%, 78%, 79%, 80%, 81%, 82%, 83%, 84%, 85%, 86%, 87%, 88%, 89%, 90%, 91%, 92%, 93%, 94%, 95%, 96%, 97%, 98%, or 99% overall sequence identity to any of the amino acid sequences depicted in of Table A, preferably by the SEQ ID NO: 1958.
[0630] 8. Method, according to any of the items 1 to 7, wherein said modulated expression is effected by introducing and expressing in a plant a nucleic acid encoding a DHAR polypeptide as defined in any of the previous items.
[0631] 9. Method according to any one of items 1 to 8, wherein said nucleic acid encoding a DHAR polypeptide encodes any one of the proteins listed in Table A5 or is a portion of such a nucleic acid, or a nucleic acid capable of hybridising with such a nucleic acid.
[0632] 10. Method according to any one of items 1 to 9, wherein said nucleic acid sequence encodes an orthologue or paralogue of any of the proteins given in Table A5.
[0633] 11. Method according to any preceding item, wherein said enhanced yield-related traits comprise increased yield, preferably increased seed yield relative to control plants.
[0634] 12. Method according to any one of items 1 to 11, wherein said enhanced yield-related traits are obtained under non-stress conditions.
[0635] 13. Method according to any one of items 1 to 12, wherein said enhanced yield-related traits are obtained under conditions of drought stress, salt stress or nitrogen deficiency.
[0636] 14. Method according to any one of items 8 to 10, wherein said nucleic acid is operably linked to a constitutive promoter, preferably to a GOS2 promoter, most preferably to a GOS2 promoter from rice.
[0637] 15. Method according to any one of items 1 to 14, wherein said nucleic acid encoding a DHAR polypeptide is of plant origin.
[0638] 16. Method according to item 15 wherein said nucleic acid encoding a DHAR polypeptide is from a dicotyledonous plant, further preferably from the family Solanaceae, more preferably from the genus Solanum, most preferably from Solanum lycopersicum.
[0639] 17. Method according to item 15 wherein said nucleic acid encoding a DHAR polypeptide is from a monocotyledonous plant, further preferably from the family Poaceae, more preferably from the genus Oryza, most preferably from Oryza sativa.
[0640] 18. Method according to item 15 wherein said nucleic acid encoding a DHAR polypeptide is from a monocotyledonous plant, further preferably from the family Poaceae, more preferably from the genus Hordeum, most preferably from Hordeum vulgare.
[0641] 19. Plant or part thereof, including seeds, obtainable by a method according to any one of items 1 to 18, wherein said plant or part thereof comprises a recombinant nucleic acid encoding a DHAR polypeptide.
[0642] 20. Construct comprising:
   [0643] (i) nucleic acid encoding a DHAR polypeptide as defined in items 1 to 7;
   [0644] (ii) one or more control sequences capable of driving expression of the nucleic acid sequence of (a); and optionally
   [0645] (iii) a transcription termination sequence.
[0646] 21. Construct according to item 20, wherein one of said control sequences is a constitutive promoter, preferably a GOS2 promoter, most preferably a GOS2 promoter from rice.
[0647] 22. Use of a construct according to items 20 or 21 in a method for making plants having increased yield, particularly increased seed yield relative to control plants.
[0648] 23. Plant, plant part or plant cell transformed with a construct according to items 20 or 21.
[0649] 24. Method for the production of a transgenic plant having increased yield, particularly increased biomass and/or increased seed yield relative to control plants, comprising:
   [0650] 1. introducing and expressing in a plant a nucleic acid encoding a DHAR polypeptide as defined in items 1 to 7; and
   [0651] 2. cultivating the plant cell under conditions promoting plant growth and development.
[0652] 25. Transgenic plant having increased yield, particularly increased biomass and/or increased seed yield, relative to control plants, resulting from modulated expression of a nucleic acid encoding a DHAR polypeptide as defined in items 1 to 7, or a transgenic plant cell derived from said transgenic plant.
[0653] 26. Transgenic plant according to item 19, 23 or 25, or a transgenic plant cell derived thereof, wherein said plant is a crop plant or a monocot or a cereal, such as rice, maize, wheat, barley, millet, rye, triticale, sorghum emmer, spelt, secale, einkorn, teff, milo and oats.
[0654] 27. Harvestable parts of a plant according to item 26, wherein said harvestable parts are preferably seeds.
[0655] 28. Products derived from a plant according to item 26 and/or from harvestable parts of a plant according to item 27.
[0656] 29. Use of a nucleic acid encoding a DHAR polypeptide in enhancing yield characteristics, particularly in increasing seed yield in plants, relative to control plants.
[0657] 29. An isolated nucleic acid molecule selected from:
   [0658] (i) a nucleic acid represented by SEQ ID NO: 1997, SEQ ID NO: 2121 and SEQ ID NO: 2193;
   [0659] (ii) the complement of a nucleic acid represented by SEQ ID NO: 1997, SEQ ID NO: 2121 and SEQ ID NO: 2193;
   [0660] (iii) a nucleic acid encoding a DHAR polypeptide as represented by any one of SEQ ID NO: 1998, SEQ ID NO: 2122 and SEQ ID NO: 2194, preferably as a result of the degeneracy of the genetic code, said isolated nucleic acid can be derived from a polypeptide sequence as represented by any one of said SEQ IDs and further preferably confers enhanced yield related traits relative to control plants;
   [0661] (iv) a nucleic acid having, in increasing order of preference, at least 50%, 55%, 60%, 65%, 70%, 75%, 80%, 85%, 90%, 95%, 96%, 97%, 98%, 99% or more sequence identity with any of the nucleic acid sequences of Table A5 and further preferably confers enhanced yield related traits relative to control plants;
   [0662] (v) a nucleic acid molecule which hybridizes with a nucleic acid molecule of (i) to (iv) under stringent hybridization conditions and preferably confers enhanced yield related traits relative to control plants;
   [0663] (vi) a nucleic acid encoding a DHAR polypeptide having in increasing order of preference at least 50%, 55%, 60%, 65%, 70%, 75%, 80%, 85%, 90%, 95%, 96%, 97%, 98%, 99% or more sequence identity to any one of SEQ ID NO: 1998, SEQ ID NO: 2122 and SEQ ID NO: 2194 and any of the other amino acid sequences in Table A5 and preferably confers enhanced yield related traits relative to control plants.
[0664] 30. According to a further embodiment of the present invention, there is also provided an isolated polypeptide selected from:
   [0665] (i) an amino acid sequence represented by SEQ ID NO: 1998, SEQ ID NO: 2122 and SEQ ID NO: 2194;
   [0666] (ii) an amino acid sequence having, in increasing order of preference, at least 50%, 55%, 60%, 65%, 70%, 75%, 80%, 85%, 90%, 95%, 96%, 97%, 98%, 99% or more sequence identity to the amino acid sequence represented by SEQ ID NO: Y, and having in increasing order of preference at least 50%, 55%, 60%, 65%, 70%, 75%, 80%, 85%, 90%, 95%, 96%, 97%, 98%, 99% or more sequence identity to SEQ ID NO: 1998, SEQ ID NO: 2122 and SEQ ID NO: 2194;
   [0667] (iii) derivatives of any of the amino acid sequences given in (i) or (ii) above.

### DESCRIPTION OF FIGURES

[0668] The present invention will now be described with reference to the following figures in which:

[0669] FIG. 1 represents the domain structure of SEQ ID NO: 2 with the conserved domains PF02812 and PF00208.

[0670] FIG. 2 represents a multiple alignment of various GDH polypeptides. FIG. 2a shows an alignment of Class I GDH polypeptides, FIG. 2b shows an alignment of Class II GDH polypeptides, FIG. 2c shows an alignment of algal GDH polypeptides, FIG. 2d shows an alignment of moss GDH polypeptides. The asterisks indicate identical amino acids among the various protein sequences, colons represent highly conserved amino acid substitutions, and the dots represent less conserved amino acid substitution; on other positions there is no sequence conservation. These alignments can be used for defining further motifs, when using conserved amino acids.

[0671] FIG. 3 shows phylogenetic tree of GDH polypeptides. The proteins were aligned using MUSCLE (Edgar (2004), Nucleic Acids Research 32(5): 1792-97). A Neighbour-Joining tree was calculated using Quick-Tree (Howe et al. (2002), Bioinformatics 18(11): 1546-7). Support of the major branching after 100 bootstrap repetitions is indicated. A circular phylogram was drawn using Dendroscope (Huson et al. (2007), BMC Bioinformatics 8(1):460). Class I is the regular EC1.4.1.2 Glade, which is divided in alpha and beta subunits. Several moss GDH sequences cluster with Class I GDH sequences, and are equally useful in the methods of present invention.

[0672] FIG. 4 represents the binary vector used for increased expression in Oryza sativa of a GDH-encoding nucleic acid under the control of a rice GOS2 promoter (pGOS2). The vector for GDH expression under control of a rice RCc3 promoter has, except for the promoter sequence, an identical architecture.

[0673] FIG. 5 represents the binary vector used for increased expression in Oryza sativa of a FLA-like-encoding nucleic acid under the control of a rice GOS2 promoter (pGOS2).

[0674] FIG. 6 represents the binary vector used for increased expression in Oryza sativa of a SAUR-encoding nucleic acid under the control of a rice leaf-specific promoter comprising the sequence represented by SEQ ID NO: 1163.

[0675] FIG. 7 represents a part of the L-ascorbic acid biosynthesis and oxidation pathway in tomato showing the role of DHAR.

[0676] FIG. 8 shows phylogenetic tree of DHAR polypeptides. H. vulgare_c62776255 (CHL), H. vulgare_gi_{—}21150952 (CYT), S. lycopersicum_TC196877 (CYT) and S. lycopersicum_AY971874 (CHL); CHL=chloroplasmatic; CYT=Cytosolic.

[0677] FIG. 9 represents the binary vector used for increased expression in Oryza sativa of a DHAR-encoding nucleic acid under the control of a rice GOS2 promoter (pGOS2).

### EXAMPLES

[0678] The present invention will now be described with reference to the following examples, which are by way of illustration alone. The following examples are not intended to completely define or otherwise limit the scope of the invention.

[0679] DNA manipulation: unless otherwise stated, recombinant DNA techniques are performed according to standard protocols described in (Sambrook (2001) Molecular Cloning: a laboratory manual, 3rd Edition Cold Spring Harbor Laboratory Press, CSH, New York) or in Volumes 1 and 2 of Ausubel et al. (1994), Current Protocols in Molecular Biology, Current Protocols. Standard materials and methods for plant molecular work are described in Plant Molecular Biology Labfax (1993) by R. D. D. Croy, published by BIOS Scientific Publications Ltd (UK) and Blackwell Scientific Publications (UK).

### Example 1

### Identification of Sequences Related to the Nucleic Acid Sequence Used in the Methods of the Invention

[0680] Sequences (full length cDNA, ESTs or genomic) related to the nucleic acid sequence used in the methods of the present invention were identified amongst those maintained in the Entrez Nucleotides database at the National Center for Biotechnology Information (NCBI) using database sequence search tools, such as the Basic Local Alignment Tool (BLAST) (Altschul et al. (1990) J. Mol. Biol. 215:403-410; and Altschul et al. (1997) Nucleic Acids Res. 25:3389-3402). The program is used to find regions of local similarity between sequences by comparing nucleic acid or polypeptide sequences to sequence databases and by calculating the statistical significance of matches. For example, the polypeptide encoded by the nucleic acid used in the present invention was used for the TBLASTN algorithm, with default settings and the filter to ignore low complexity sequences set off. The output of the analysis was viewed by pairwise comparison, and ranked according to the probability score (E-value), where the score reflect the probability that a particular alignment occurs by chance (the lower the E-value, the more significant the hit). In addition to E-values, comparisons were also scored by percentage identity. Percentage identity refers to the number of identical nucleotides (or amino acids) between the two compared nucleic acid (or polypeptide) sequences over a particular length. In some instances, the default parameters may be adjusted to modify the stringency of the search. For example the E-value may be increased to show less stringent matches. This way, short nearly exact matches may be identified.

### 1. Glutamate Dehydrogenase (GDH) Polypeptides

[0681] Table A1 provides a list of nucleic acid sequences related to the nucleic acid sequence used in the methods of the present invention.

TABLE A1
Examples of GDH polypeptides:

| | Nucleic acid | Polypeptide |
|---|---|---|
| Name | SEQ ID NO | SEQ ID NO |
| Z. mays AY106054#1 (beta) | 1 | 2 |
| A. thaliana AT5G07440.1#1 | 29 | 100 |
| B. napus AB066298#1 | 30 | 101 |
| C. solstitialis TA305 347529#1 | 31 | 102 |
| G. hirsutum TA29927 3635#1 | 32 | 103 |
| G. max TA64336 3847#1 | 33 | 104 |
| G. raimondii TA10049 29730#1 | 34 | 105 |
| G. raimondii TA10097 29730#1 | 35 | 106 |
| H. vulgare TA34363 4513#1 | 36 | 107 |
| M. truncatula CR931735 5.4#1 | 37 | 108 |
| O. sativa LOC Os04g45970.1#1 | 38 | 109 |
| O. sativa Os02g0650900 | 39 | 110 |
| P. canadensis TA199 3690#1 | 40 | 111 |
| P. taeda TA12661 3352#1 | 41 | 112 |
| P. tremula TA7375 113636#1 | 42 | 113 |
| P. trichocarpa 575509#1 | 43 | 114 |
| P. trichocarpa 828764#1 | 44 | 115 |
| S. bicolor 5286803#1 | 45 | 116 |
| S. lycopersicum TA48180 4081#1 | 46 | 117 |
| T. aestivum TA70276 4565#1 | 47 | 118 |
| V. vinifera TA36948 29760#1 | 48 | 119 |
| Z. mays TA160461 4577#1 | 49 | 120 |
| A. formosa x pubescens TA8521 338618#1 | 50 | 121 |
| A. officinalis TA1966 4686#1 | 51 | 122 |
| A. thaliana AT3G03910.1#1 | 52 | 123 |
| A. thaliana AT5G18170.1#1 | 53 | 124 |
| C. solstitialis TA153 347529#1 | 54 | 125 |
| G. max Gm0155x00045.1#1 | 55 | 126 |
| G. raimondii TA9810 29730#1 | 56 | 127 |
| H. annuus TA8643 4232#1 | 57 | 128 |
| H. argophyllus TA1274 73275#1 | 58 | 129 |
| H. vulgare TA35352 4513#1 | 59 | 130 |
| I. nil TA11677 35883#1 | 60 | 131 |
| M. crystallinum TA3379 3544#1 | 61 | 132 |
| M. truncatula AC174375 7.5#1 | 62 | 133 |
| M. truncatula TA21862 3880#1 | 63 | 134 |
| N. tabacum TA18464 4097#1 | 64 | 135 |
| O. basilicum TA2019 39350#1 | 65 | 136 |
| O. sativa Os03g0794500#1 | 66 | 137 |
| P. glauca TA14146 3330#1 | 67 | 138 |
| P. sitchensis TA13960 3332#1 | 68 | 139 |
| P. trichocarpa 571209#1 | 69 | 140 |
| P. trichocarpa 826140#1 | 70 | 141 |
| S. lycopersicum TA35879 4081#1 | 71 | 142 |
| S. tuberosum TA29537 4113#1 | 72 | 143 |
| T .aestivum TA69991 4565#1 | 73 | 144 |
| V. vinifera GSVIVT00025474001#1 | 74 | 145 |
| V. vinifera TA43933 29760#1 | 75 | 146 |
| M. polymorpha TA1057 3197#1 | 76 | 147 |
| P. patens 126976#1 | 77 | 148 |
| S. moellendorffii 78170#1 | 78 | 149 |
| A. thaliana AT1G51720.1#1 | 79 | 150 |
| Chlorella 25065#1 | 80 | 151 |
| Chlorella 52469#1 | 81 | 152 |
| E. huxleyi 69206#1 | 82 | 153 |
| G. max Gm0146x00171#1 | 83 | 154 |
| O. sativa AK107677#1 | 84 | 155 |
| O. sativa LOC Os01g37760.1#1 | 85 | 156 |
| P. patens 70453#1 | 86 | 157 |
| P. trichocarpa scaff 97.38#1 | 87 | 158 |
| P. tricornutum 13951#1 | 88 | 159 |
| S. bicolor 5282378#1 | 89 | 160 |
| S. moellendorffii 90033#1 | 90 | 161 |
| V. vinifera GSVIVT00034207001#1 | 91 | 162 |
| C. reinhardtii 82916#1 | 92 | 163 |
| Chlorella 31314#1 | 93 | 164 |
| Chlorella 34336#1 | 94 | 165 |
| V. carteri 63307#1 | 95 | 166 |
| V. carteri 65188#1 | 96 | 167 |
| P. patens 190253#1 | 97 | 168 |
| S. moellendorffii 402894#1 | 98 | 169 |
| B. napus BN06MC06056 | 99 | 170 |

[0682] In some instances, related sequences have tentatively been assembled and publicly disclosed by research institutions, such as The Institute for Genomic Research (TIGR; beginning with TA). The Eukaryotic Gene Orthologs (EGO) database may be used to identify such related sequences, either by keyword search or by using the BLAST algorithm with the nucleic acid sequence or polypeptide sequence of interest. On other instances, special nucleic acid sequence databases have been created for particular organisms, such as by the Joint Genome Institute. Further, access to proprietary databases, has allowed the identification of novel nucleic acid and polypeptide sequences.

### 2. Fasciclin-Like AGP (FLAB) Polypeptides

[0683] Table A2 provides a list of nucleic acid sequences related to SEQ ID NO: 171 and SEQ ID NO: 172.

TABLE A2
Examples of FLA-like nucleic acids and polypeptides:

| | | Poly- |
|---|---|---|
| | Nucleic | nucleo- |
| | acid | tide |
| | SEQ ID | SEQ ID |
| Name | NO: | NO: |
| L. esculemtum_25487; 6372; 12; 1247; 4081; 39#1 | 171 | 172 |
| A. cepa_TC4580#1 | 173 | 174 |
| A. thaliana_AT2G45470.1#1 | 175 | 176 |
| A. thaliana_AT2G04780.2#1 | 177 | 178 |
| A. thaliana_AT3G52370.1#1 | 179 | 180 |
| A. thaliana_AT1G03870.1#1 | 181 | 182 |
| A. thaliana_AT3G46550.1#1 | 183 | 184 |
| A. thaliana_AT4G31370.1#2 | 185 | 186 |
| A. thaliana_AT5G44130.1#1 | 187 | 188 |
| A. thaliana_AT3G11700.1#1 | 189 | 190 |
| A. thaliana_AT5G03170.1#1 | 191 | 192 |
| A. thaliana_AT5G06390.1#1 | 193 | 194 |
| A. thaliana_AT4G31370.1#1 | 195 | 196 |
| A. thaliana_AT4G12730.1#1 | 197 | 198 |
| A. thaliana_AT2G48140.1#1 | 199 | 200 |
| A. thaliana_AT1G28410.1#1 | 201 | 202 |
| A. thaliana_AT3G60900.1#1 | 203 | 204 |
| A. thaliana_AT3G12660.1#1 | 205 | 206 |
| A. thaliana_AT2G04780.1#1 | 207 | 208 |
| A. thaliana_AT5G60490.1#1 | 209 | 210 |
| A. thaliana_AT2G20520.1#1 | 211 | 212 |
| A. thaliana_AT5G55730.1#1 | 213 | 214 |
| A. thaliana_AT2G35860.1#1 | 215 | 216 |
| A. thaliana_AT2G24450.1#1 | 217 | 218 |
| B. napus_BN06MC20798_46793445@20729#1 | 219 | 220 |
| G. max_GM06MC34339_so40f04@33543#1 | 221 | 222 |
| H. vulgare_gi_24275592#1 | 223 | 224 |
| H. vulgare_gi_21973830#1 | 225 | 226 |
| H. vulgare_c62592154hv270303@7445#1 | 227 | 228 |
| M. truncatula_AC139344_22.4#1 | 229 | 230 |
| M. truncatula_AC141108_13.4#1 | 231 | 232 |
| M. truncatula_AC148446_20.4#1 | 233 | 234 |
| M. truncatula_AC183923_29.4#1 | 235 | 236 |
| M. truncatula_AC141110_2.5#1 | 237 | 238 |
| M. truncatula_AC183305_19.5#1 | 239 | 240 |
| M. truncatula_AC152407_24.4#1 | 241 | 242 |
| M. truncatula_CU062643_4.3#1 | 243 | 244 |
| M. truncatula_AC152407_10.4#1 | 245 | 246 |
| M. truncatula_AC128638_8.4#1 | 247 | 248 |
| M. truncatula_AC139344_27.4#1 | 249 | 250 |
| M. truncatula_AC152407_34.4#1 | 251 | 252 |
| M. truncatula_AC183923_12.4#1 | 253 | 254 |
| M. truncatula_AC150890_10.4#1 | 255 | 256 |
| M. truncatula_AC150890_2.4#1 | 257 | 258 |
| M. truncatula_AC141108_46.4#1 | 259 | 260 |
| M. truncatula_AC202334_12.4#1 | 261 | 262 |
| M. truncatula_AC141108_11.4#1 | 263 | 264 |
| M. truncatula_AC148655_16.4#1 | 265 | 266 |
| M. truncatula_AC140026_25.4#1 | 267 | 268 |
| M. truncatula_AC139344_13.4#1 | 269 | 270 |
| M. truncatula_AC150890_21.4#1 | 271 | 272 |
| M. truncatula_AC202325_14.4#1 | 273 | 274 |
| M. truncatula_AC144515_29.5#1 | 275 | 276 |
| M. truncatula_AC139344_21.4#1 | 277 | 278 |
| O. sativa_LOC_Os08g39270.1#1 | 279 | 280 |
| O. sativa_LOC_Os07g06680.1#1 | 281 | 282 |
| O. sativa_LOC_Os08g38270.1#1 | 283 | 284 |
| O. sativa_LOC_Os04g48490.1#1 | 285 | 286 |
| O. sativa_LOC_Os09g30010.1#1 | 287 | 288 |
| O. sativa_LOC_Os01g06580.1#1 | 289 | 290 |
| O. sativa_LOC_Os04g39590.1#1 | 291 | 292 |
| O. sativa_LOC_Os05g38500.1#1 | 293 | 294 |
| O. sativa_LOC_Os02g20540.1#1 | 295 | 296 |
| O. sativa_LOC_Os04g39600.1#1 | 297 | 298 |
| O. sativa_LOC_Os03g03600.1#1 | 299 | 300 |
| O. sativa_LOC_Os01g62380.2#1 | 301 | 302 |
| O. sativa_LOC_Os01g62380.1#1 | 303 | 304 |
| O. sativa_LOC_Os09g07350.1#1 | 305 | 306 |
| O. sativa_LOC_Os02g20560.1#1 | 307 | 308 |
| O. sativa_LOC_Os06g44660.1#1 | 309 | 310 |
| O. sativa_LOC_Os05g48890.1#1 | 311 | 312 |
| O. sativa_LOC_Os08g23180.1#1 | 313 | 314 |
| O. sativa_LOC_Os01g47780.1#1 | 315 | 316 |
| O. sativa_LOC_Os02g26290.1#1 | 317 | 318 |
| O. sativa_LOC_Os03g57460.1#1 | 319 | 320 |
| O. sativa_LOC_Os02g26320.1#1 | 321 | 322 |
| O. sativa_LOC_Os04g21570.1#1 | 323 | 324 |
| O. sativa_LOC_Os06g17460.1#1 | 325 | 326 |
| O. sativa_LOC_Os05g07060.1#1 | 327 | 328 |
| O. sativa_LOC_Os05g48900.1#1 | 329 | 330 |
| O. sativa_LOC_Os02g49420.1#1 | 331 | 332 |
| O. sativa_LOC_Os09g30486.1#1 | 333 | 334 |
| P. trichocarpa_scaff_XI.599#1 | 335 | 336 |
| P. trichocarpa_scaff_I.2651#1 | 337 | 338 |
| P. trichocarpa_scaff_XIV.1154#1 | 339 | 340 |
| P. trichocarpa_scaff_IX.1517#1 | 341 | 342 |
| P. trichocarpa_scaff_VI.1374#1 | 343 | 344 |
| P. trichocarpa_scaff_II.2021#1 | 345 | 346 |
| P. trichocarpa_scaff_I.170#1 | 347 | 348 |
| P. trichocarpa_scaff_147.53#1 | 349 | 350 |
| P. trichocarpa_scaff_XVI.813#1 | 351 | 352 |
| P. trichocarpa_scaff_XIV.1105#1 | 353 | 354 |
| P. trichocarpa_scaff_193.12#1 | 355 | 356 |
| S. lycopersicum_TC198578#1 | 357 | 358 |
| S. lycopersicum_TC199817#1 | 359 | 360 |
| S. lycopersicum_TC192348#1 | 361 | 362 |
| S. lycopersicum_TC204739#1 | 363 | 364 |
| S. lycopersicum_TC192457#1 | 365 | 366 |
| S. lycopersicum_TC215657#1 | 367 | 368 |
| 25227; 3269; 66; 1526; 4530; 39#1 | 369 | 370 |
| 958; 1671; 46; 1308; 3702; 39#1 | 371 | 372 |
| 951; 1678; 25; 1293; 3702; 39#1 | 373 | 374 |
| 955; 1674; 25; 1287; 3702; 39#1 | 375 | 376 |
| 2644; 0067; 85; 849; 3702; 32#1 | 377 | 378 |
| 24310; 6373; 108; 1313; 4530; 39#1 | 379 | 380 |
| 3260; 3252; 71; 1345; 3702; 39#1 | 381 | 382 |
| T. aestivum_NP9351276#1 | 383 | 384 |
| T. aestivum_TC305123#1 | 385 | 386 |
| T. aestivum_TC325646#1 | 387 | 388 |
| T. aestivum_TC344445#1 | 389 | 390 |
| T. aestivum_TC305090#1 | 391 | 392 |
| T. aestivum_TC299845#1 | 393 | 394 |
| T. aestivum_CK216481#1 | 395 | 396 |
| T. aestivum_CA627200#1 | 397 | 398 |
| T. aestivum_TC291284#1 | 399 | 400 |
| T. aestivum_TC312495#1 | 401 | 402 |
| T. aestivum_TC304072#1 | 403 | 404 |
| T. aestivum_TC277533#1 | 405 | 406 |
| T. aestivum_BQ245887#1 | 407 | 408 |
| T. aestivum_TC318484#1 | 409 | 410 |
| T. aestivum_DR740621#1 | 411 | 412 |
| T. aestivum_TC304082#1 | 413 | 414 |
| T. aestivum_TC293788#1 | 415 | 416 |
| T. aestivum_CV769415#1 | 417 | 418 |
| T. aestivum_NP9351269#1 | 419 | 420 |
| T. aestivum_CV762263#1 | 421 | 422 |
| T. aestivum_TC311105#1 | 423 | 424 |
| T. aestivum_TC292041#1 | 425 | 426 |
| T. aestivum_TC288810#1 | 427 | 428 |
| T. aestivum_TC296661#1 | 429 | 430 |
| T. aestivum_TC306434#1 | 431 | 432 |
| T. aestivum_TC278029#1 | 433 | 434 |
| T. aestivum_TC328684#1 | 435 | 436 |
| T. aestivum_TC296079#1 | 437 | 438 |
| T. aestivum_TC277708#1 | 439 | 440 |
| T. aestivum_TC298398#1 | 441 | 442 |
| T. aestivum_CV780845#1 | 443 | 444 |
| T. aestivum_TC278190#1 | 445 | 446 |
| T. aestivum_NP9351275#1 | 447 | 448 |
| T. aestivum_TC294615#1 | 449 | 450 |
| T. aestivum_CK212201#1 | 451 | 452 |
| T. aestivum_TC287761#1 | 453 | 454 |
| T. aestivum_NP9351277#1 | 455 | 456 |
| T. aestivum_TC321709#1 | 457 | 458 |
| T. aestivum_TC279125#1 | 459 | 460 |
| T. aestivum_TC277909#1 | 461 | 462 |
| T. aestivum_TC278001#1 | 463 | 464 |
| T. aestivum_NP9351274#1 | 465 | 466 |
| T. aestivum_TC330335#1 | 467 | 468 |
| Z. mays_ZM07MC23583_BFb0033M16@23517#1 | 469 | 470 |
| Z. mays_ZM07MC29916_BFb0139D12@29826#1 | 471 | 472 |
| Z. mays_ZM07MC14325_59158483@14291#1 | 473 | 474 |
| Z. mays_ZM07MC23082_BFb0380F07@23017#1 | 475 | 476 |
| Z. mays_ZM07MC29207_BFb0067H14@29117#1 | 477 | 478 |
| Z. mays_ZM07MC33226_BFb0305O24@33126#1 | 479 | 480 |
| Z. mays_ZM07MC33725_BFb0316M24@33623#1 | 481 | 482 |
| Z. mays_ZM07MC26383_BFb0121A09@26305#1 | 483 | 484 |
| Z. mays_ZM07MC32279_BFb0284P13@32182#1 | 485 | 486 |

[0684] Sequences have been tentatively assembled and publicly disclosed by research institutions, such as The Institute for Genomic Research (TIGR; beginning with TA). The Eukaryotic Gene Orthologs (EGO) database may be used to identify such related sequences, either by keyword search or by using the BLAST algorithm with the nucleic acid sequence or polypeptide sequence of interest. Special nucleic acid sequence databases have been created for particular organisms, such as by the Joint Genome Institute. Furthermore, access to proprietary databases, has allowed the identification of novel nucleic acid and polypeptide sequences.

### 3. Small Auxin-Up RNA (SAUR) Polypeptides

[0685] Table A3 provides a list of nucleic acid sequences related to SEQ ID NO: 501 and SEQ ID NO: 502.

TABLE A3
Examples of SAUR polypeptides:

| | Nucleic acid | Polypeptide |
|---|---|---|
| Name (AGI code or gene model) | SEQ ID NO: | SEQ ID NO: |
| AT2G21210 | 501 | 502 |
| AT1G75590.1 | 503 | 504 |
| AT1G75580.1 | 505 | 506 |
| AT1G29430.1 | 507 | 508 |
| AT1G29440.1 | 509 | 510 |
| AT1G29450.1 | 511 | 512 |
| AT1G29460.1 | 513 | 514 |
| AT1G29490.1 | 515 | 516 |
| AT1G29500.1 | 517 | 518 |
| AT1G29510.1 | 519 | 520 |
| AT1G29420.1 | 521 | 522 |
| AT1G43040.1 | 523 | 524 |
| AT1G16510.1 | 525 | 526 |
| AT1G20470.1 | 527 | 528 |
| AT1G19840.1 | 529 | 530 |
| AT2G16580.1 | 531 | 532 |
| AT2G21200.1 | 533 | 534 |
| AT2G36210.1 | 535 | 536 |
| AT2G45210.1 | 537 | 538 |
| AT2G42870.1 | 539 | 540 |
| AT2G37030.1 | 541 | 542 |
| AT2G18010.1 | 543 | 544 |
| AT2G24400.1 | 545 | 546 |
| AT2G46690.1 | 547 | 548 |
| AT3G03850.1 | 549 | 550 |
| AT3G03840.1 | 551 | 552 |
| AT3G03830.1 | 553 | 554 |
| AT3G03820.1 | 555 | 556 |
| AT3G61900.1 | 557 | 558 |
| AT3G51200.1 | 559 | 560 |
| AT3G43120.1 | 561 | 562 |
| AT3G09870.1 | 563 | 564 |
| AT3G20220.1 | 565 | 566 |
| AT3G12830.1 | 567 | 568 |
| AT3G58850.1 | 569 | 570 |
| AT3G60690.1 | 571 | 572 |
| AT3G53250.1 | 573 | 574 |
| AT4G34770.1 | 575 | 576 |
| AT4G34780.1 | 577 | 578 |
| AT4G34790.1 | 579 | 580 |
| AT4G34800.1 | 581 | 582 |
| AT4G34810.1 | 583 | 584 |
| AT4G13790.1 | 585 | 586 |
| AT4G31320.1 | 587 | 588 |
| AT4G09530.1 | 589 | 590 |
| AT4G00880.1 | 591 | 592 |
| AT4G36110.1 | 593 | 594 |
| AT5G03310.1 | 595 | 596 |
| AT5G18060.1 | 597 | 598 |
| AT5G18010.1 | 599 | 600 |
| AT5G18020.1 | 601 | 602 |
| AT5G18030.1 | 603 | 604 |
| AT5G18050.1 | 605 | 606 |
| AT5G42410.1 | 607 | 608 |
| AT5G50760.1 | 609 | 610 |
| AT5G53590.1 | 611 | 612 |
| AT5G27780.1 | 613 | 614 |
| AT5G20810.2 | 615 | 616 |
| AT5G20820.1 | 617 | 618 |
| AT1G72430.1 | 619 | 620 |
| AT1G76190.1 | 621 | 622 |
| AT1G79130.1 | 623 | 624 |
| AT1G19830.1 | 625 | 626 |
| AT1G56150.1 | 627 | 628 |
| AT2G21220.1 | 629 | 630 |
| AT4G22620.1 | 631 | 632 |
| AT4G12410.1 | 633 | 634 |
| AT4G34750.1 | 635 | 636 |
| AT4G34760.1 | 637 | 638 |
| AT4G38840.1 | 639 | 640 |
| AT4G38850.1 | 641 | 642 |
| AT4G38860.1 | 643 | 644 |
| AT5G66260.1 | 645 | 646 |
| AT5G18080.1 | 647 | 648 |
| AT5G10990.1 | 649 | 650 |
| AT2G28085.1 | 651 | 652 |
| AT3G12955.1 | 653 | 654 |
| AT3G03847.1 | 655 | 656 |
| AT1G17345.1 | 657 | 658 |
| AT5G20810.2 | 659 | 660 |
| AT4G38825.1 | 661 | 662 |
| A. formosa_TA10626_338618 | 663 | 664 |
| A. formosa_TA19524_338618 | 665 | 666 |
| A. hypogaea_EE125424 | 667 | 668 |
| A. hypogaea_EG029475 | 669 | 670 |
| A. majus_AJ787925 | 671 | 672 |
| A. majus_AJ789609 | 673 | 674 |
| A. majus_AJ792146 | 675 | 676 |
| A. majus_AJ793092 | 677 | 678 |
| A. stenosperma_EH042215 | 679 | 680 |
| A. stenosperma_EH042858 | 681 | 682 |
| A. stenosperma_EH044560 | 683 | 684 |
| B. vulgaris_EG549451 | 685 | 686 |
| B. vulgaris_EG551164 | 687 | 688 |
| C. annuum_AF492625 | 689 | 690 |
| C. annuum_AF492626 | 691 | 692 |
| C. annuum_AF492628 | 693 | 694 |
| C. endivia_EL370469 | 695 | 696 |
| C. endivia_EL370631 | 697 | 698 |
| C. endivia_TA1177_114280 | 699 | 700 |
| C. endivia_TA539_114280 | 701 | 702 |
| C. intybus_EH692435 | 703 | 704 |
| C. intybus_EH703830 | 705 | 706 |
| C. intybus_EH706838 | 707 | 708 |
| C. intybus_TA1426_13427 | 709 | 710 |
| C. maculosa_EH742386 | 711 | 712 |
| C. maculosa_EH742856 | 713 | 714 |
| C. maculosa_EH749319 | 715 | 716 |
| C. maculosa_TA4833_215693 | 717 | 718 |
| C. reticulata_TA893_85571 | 719 | 720 |
| C. tinctorius_EL383021 | 721 | 722 |
| C. tinctorius_EL402472 | 723 | 724 |
| C. tinctorius_EL404623 | 725 | 726 |
| C. tinctorius_EL409357 | 727 | 728 |
| C. tinctorius_EL410673 | 729 | 730 |
| C. tinctorius_EL511071 | 731 | 732 |
| F. vesca_DV439835 | 733 | 734 |
| F. vesca_DY671180 | 735 | 736 |
| F. vesca_EX674842 | 737 | 738 |
| F. vesca_TA11405_57918 | 739 | 740 |
| G. hirsutum_DW503615 | 741 | 742 |
| G. hirsutum_DW509807 | 743 | 744 |
| G. hirsutum_DW512758 | 745 | 746 |
| G. hirsutum_DW519665 | 747 | 748 |
| G. hirsutum_TA37257_3635 | 749 | 750 |
| G. hirsutum_TA38692_3635 | 751 | 752 |
| G. hirsutum_TA41018_3635 | 753 | 754 |
| G. hybrid_TA4305_18101 | 755 | 756 |
| G. max_AW597359 | 757 | 758 |
| G. max_BE347326 | 759 | 760 |
| G. max_BQ298199 | 761 | 762 |
| G. max_CD391803 | 763 | 764 |
| G. max_TA64893_3847 | 765 | 766 |
| G. max_TA67504_3847 | 767 | 768 |
| G. max_TA70411_3847 | 769 | 770 |
| G. raimondii_CO102462 | 771 | 772 |
| G. raimondii_CO116635 | 773 | 774 |
| H. annuus_DY910229 | 775 | 776 |
| H. annuus_TA11757_4232 | 777 | 778 |
| H. centranthoides_CB088060 | 779 | 780 |
| H. exilis_TA2077_400408 | 781 | 782 |
| H. exilis_TA3412_400408 | 783 | 784 |
| H. exilis_TA3635_400408 | 785 | 786 |
| H. paradoxus_EL483081 | 787 | 788 |
| H. paradoxus_EL491346 | 789 | 790 |
| H. paradoxus_TA5129_73304 | 791 | 792 |
| H. petiolaris_DY943735 | 793 | 794 |
| H. petiolaris_DY952438 | 795 | 796 |
| H. petiolaris_DY954041 | 797 | 798 |
| H. terminalis_CB076591 | 799 | 800 |
| H. tuberosus_EL457421 | 801 | 802 |
| H. tuberosus_EL463700 | 803 | 804 |
| H. tuberosus_EL465041 | 805 | 806 |
| H. tuberosus_EL468225 | 807 | 808 |
| H. tuberosus_TA4474_4233 | 809 | 810 |
| L. japonicus_AW719590 | 811 | 812 |
| L. japonicus_TA9854_34305 | 813 | 814 |
| L. perennis_DW080686 | 815 | 816 |
| L. perennis_DW081245 | 817 | 818 |
| L. perennis_DW083509 | 819 | 820 |
| L. perennis_TA3114_43195 | 821 | 822 |
| L. saligna_DW047772 | 823 | 824 |
| L. saligna_DW053071 | 825 | 826 |
| L. saligna_DW067950 | 827 | 828 |
| L. saligna_DW070649 | 829 | 830 |
| L. saligna_TA3313_75948 | 831 | 832 |
| L. sativa_DW127263 | 833 | 834 |
| L. sativa_DY980480 | 835 | 836 |
| L. sativa_TA10685_4236 | 837 | 838 |
| L. sativa_TA10743_4236 | 839 | 840 |
| L. sativa_TA4959_4236 | 841 | 842 |
| L. serriola_DW112451 | 843 | 844 |
| L. serriola_DW116661 | 845 | 846 |
| L. serriola_TA3320_75943 | 847 | 848 |
| L. serriola_TA4842_75943 | 849 | 850 |
| L. usitatissimus_8480 | 851 | 852 |
| L. virosa_DW153036 | 853 | 854 |
| L. virosa_DW155923 | 855 | 856 |
| L. virosa_DW174061 | 857 | 858 |
| L. virosa_TA2170_75947 | 859 | 860 |
| L. virosa_TA3812_75947 | 861 | 862 |
| M. domestica_CO067974 | 863 | 864 |
| M. domestica_CO756438 | 865 | 866 |
| M. domestica_CX023091 | 867 | 868 |
| M. domestica_TA37946_3750 | 869 | 870 |
| M. domestica_TA38953_3750 | 871 | 872 |
| M. domestica_TA39022_3750 | 873 | 874 |
| M. domestica_TA40409_3750 | 875 | 876 |
| M. domestica_TA44601_3750 | 877 | 878 |
| M. sativa_CO513303 | 879 | 880 |
| M. sativa_CO515084 | 881 | 882 |
| M. sativa_CO515320 | 883 | 884 |
| M. sativa_CO515889 | 885 | 886 |
| M. sativa_CO517303 | 887 | 888 |
| M. truncatula_BQ150674 | 889 | 890 |
| M. truncatula_BQ152587 | 891 | 892 |
| M. truncatula_BQ153482 | 893 | 894 |
| M. truncatula_BQ157435 | 895 | 896 |
| M. truncatula_TA25290_3880 | 897 | 898 |
| M. truncatula_TA35769_3880 | 899 | 900 |
| N. benthamiana_EH366121 | 901 | 902 |
| N. benthamiana_EH368884 | 903 | 904 |
| N. benthamiana_EH370704 | 905 | 906 |
| N. tabacum_BP137194 | 907 | 908 |
| N. tabacum_BP533711 | 909 | 910 |
| N. tabacum_DV158716 | 911 | 912 |
| N. tabacum_EB427417 | 913 | 914 |
| N. tabacum_EB439329 | 915 | 916 |
| N. tabacum_EB439347 | 917 | 918 |
| O. sativa_OsSAUR1 | 919 | 920 |
| O. sativa_OsSAUR10 | 921 | 922 |
| O. sativa_OsSAUR11 | 923 | 924 |
| O. sativa_OsSAUR12 | 925 | 926 |
| O. sativa_OsSAUR13 | 927 | 928 |
| O. sativa_OsSAUR14 | 929 | 930 |
| O. sativa_OsSAUR15 | 931 | 932 |
| O. sativa_OsSAUR16 | 933 | 934 |
| O. sativa_OsSAUR17 | 935 | 936 |
| O. sativa_OsSAUR18 | 937 | 938 |
| O. sativa_OsSAUR19 | 939 | 940 |
| O. sativa_OsSAUR2 | 941 | 942 |
| O. sativa_OsSAUR20 | 943 | 944 |
| O. sativa_OsSAUR21 | 945 | 946 |
| O. sativa_OsSAUR22 | 947 | 948 |
| O. sativa_OsSAUR23 | 949 | 950 |
| O. sativa_OsSAUR24 | 951 | 952 |
| O. sativa_OsSAUR25 | 953 | 954 |
| O. sativa_OsSAUR26 | 955 | 956 |
| O. sativa_OsSAUR27 | 957 | 958 |
| O. sativa_OsSAUR28 | 959 | 960 |
| O. sativa_OsSAUR29 | 961 | 962 |
| O. sativa_OsSAUR3 | 963 | 964 |
| O. sativa_OsSAUR30 | 965 | 966 |
| O. sativa_OsSAUR31 | 967 | 968 |
| O. sativa_OsSAUR32 | 969 | 970 |
| O. sativa_OsSAUR33 | 971 | 972 |
| O. sativa_OsSAUR34 | 973 | 974 |
| O. sativa_OsSAUR35 | 975 | 976 |
| O. sativa_OsSAUR36 | 977 | 978 |
| O. sativa_OsSAUR37 | 979 | 980 |
| O. sativa_OsSAUR38 | 981 | 982 |
| O. sativa_OsSAUR39 | 983 | 984 |
| O. sativa_OsSAUR4 | 985 | 986 |
| O. sativa_OsSAUR40 | 987 | 988 |
| O. sativa_OsSAUR41 | 989 | 990 |
| O. sativa_OsSAUR42 | 991 | 992 |
| O. sativa_OsSAUR44 | 993 | 994 |
| O. sativa_OsSAUR45 | 995 | 996 |
| O. sativa_OsSAUR46 | 997 | 998 |
| O. sativa_OsSAUR47 | 999 | 1000 |
| O. sativa_OsSAUR48 | 1001 | 1002 |
| O. sativa_OsSAUR49 | 1003 | 1004 |
| O. sativa_OsSAUR5 | 1005 | 1006 |
| O. sativa_OsSAUR51 | 1007 | 1008 |
| O. sativa_OsSAUR52 | 1009 | 1010 |
| O. sativa_OsSAUR53 | 1011 | 1012 |
| O. sativa_OsSAUR54 | 1013 | 1014 |
| O. sativa_OsSAUR55 | 1015 | 1016 |
| O. sativa_OsSAUR56 | 1017 | 1018 |
| O. sativa_OsSAUR57 | 1019 | 1020 |
| O. sativa_OsSAUR58 | 1021 | 1022 |
| O. sativa_OsSAUR6 | 1023 | 1024 |
| O. sativa_OsSAUR7 | 1025 | 1026 |
| O. sativa_OsSAUR8 | 1027 | 1028 |
| O. sativa_OsSAUR9 | 1029 | 1030 |
| P. armeniaca_CV047410 | 1031 | 1032 |
| P. armeniaca_TA4482_36596 | 1033 | 1034 |
| P. ginseng_DV554701 | 1035 | 1036 |
| P. persica_DY646333 | 1037 | 1038 |
| P. persica_TA3244_3760 | 1039 | 1040 |
| P. persica_TA3246_3760 | 1041 | 1042 |
| P. persica_TA8343_3760 | 1043 | 1044 |
| P. sativum_CD860263 | 1045 | 1046 |
| P. trichocarpa_scaff_IV.1273 | 1047 | 1048 |
| P. trichocarpa_scaff_IV.1274 | 1049 | 1050 |
| P. trichocarpa_scaff_IV.1275 | 1051 | 1052 |
| P. trichocarpa_scaff_IV.1277 | 1053 | 1054 |
| P. trichocarpa_scaff_IV.1278 | 1055 | 1056 |
| P. trichocarpa_scaff_IV.1283 | 1057 | 1058 |
| P. trichocarpa_scaff_IX.408 | 1059 | 1060 |
| P. trichocarpa_scaff_IX.410 | 1061 | 1062 |
| P. trichocarpa_scaff_IX.412 | 1063 | 1064 |
| P. trichocarpa_scaff_IX.414 | 1065 | 1066 |
| P. vulgaris_CV540653 | 1067 | 1068 |
| P. vulgaris_TA5174_3885 | 1069 | 1070 |
| P. vulgaris_TA5755_3885 | 1071 | 1072 |
| R. communis_EE260652 | 1073 | 1074 |
| R. communis_TA1427_3988 | 1075 | 1076 |
| R. communis_TA1793_3988 | 1077 | 1078 |
| R. communis_TA4032_3988 | 1079 | 1080 |
| R. communis_TA4537_3988 | 1081 | 1082 |
| S. lycopersicum_AI772038 | 1083 | 1084 |
| S. lycopersicum_BG133762 | 1085 | 1086 |
| S. lycopersicum_BI925420 | 1087 | 1088 |
| S. lycopersicum_BP891299 | 1089 | 1090 |
| S. lycopersicum_TA47646_4081 | 1091 | 1092 |
| S. lycopersicum_TA51451_4081 | 1093 | 1094 |
| S. lycopersicum_TA55498_4081 | 1095 | 1096 |
| S. rebaudiana_BG524629 | 1097 | 1098 |
| S. tuberosum_BQ506350 | 1099 | 1100 |
| S. tuberosum_CV469819 | 1101 | 1102 |
| S. tuberosum_CV497917 | 1103 | 1104 |
| S. tuberosum_CV500881 | 1105 | 1106 |
| S. tuberosum_CV506321 | 1107 | 1108 |
| S. tuberosum_DN921670 | 1109 | 1110 |
| S. tuberosum_TA40200_4113 | 1111 | 1112 |
| T. erecta_1962 | 1113 | 1114 |
| T. erecta_3566 | 1115 | 1116 |
| T. erecta_6288 | 1117 | 1118 |
| T. erecta_684 | 1119 | 1120 |
| T. halophila_EC599448 | 1121 | 1122 |
| T. halophila_EC599895 | 1123 | 1124 |
| T. kok-saghyz_DR398853 | 1125 | 1126 |
| T. kok-saghyz_DR399601 | 1127 | 1128 |
| T. kok-saghyz_DR400973 | 1129 | 1130 |
| T. kok-saghyz_DR402050 | 1131 | 1132 |
| T. kok-saghyz_TA924_333970 | 1133 | 1134 |
| V. vinifera_EC943632 | 1135 | 1136 |
| V. vinifera_EC944862 | 1137 | 1138 |
| V. vinifera_EC955742 | 1139 | 1140 |
| V. vinifera_EC990676 | 1141 | 1142 |
| V. vinifera_EE085076 | 1143 | 1144 |
| V. vinifera_TA50539_29760 | 1145 | 1146 |
| V. vinifera_TA51081_29760 | 1147 | 1148 |
| V. vinifera_TA53202_29760 | 1149 | 1150 |

(i) Examples of SAUR polypeptides:

| | Nucleic | Poly- |
|---|---|---|
| | acid | peptide |
| | SEQ | SEQ |
| Name | ID NO: | ID NO: |
| O. sativa_TC318156#1 | 2210 | 2211 |
| A. thaliana_AT1G17345.1#1 | 2212 | 2213 |
| A. thaliana_AT1G72430.1#1 | 2214 | 2215 |
| A. thaliana_AT3G12955.1#1 | 2216 | 2217 |
| A. thaliana_AT5G20820.1#1 | 2218 | 2219 |
| G. max_Glyma07g04850.1#1 | 2220 | 2221 |
| G. max_Glyma07g08130.1#1 | 2222 | 2223 |
| G. max_Glyma08g25650.1#1 | 2224 | 2225 |
| G. max_Glyma09g08490.1#1 | 2226 | 2227 |
| G. max_Glyma13g17400.1#1 | 2228 | 2229 |
| G. max_Glyma16g01430.1#1 | 2230 | 2231 |
| G. max_Glyma17g05090.1#1 | 2232 | 2233 |
| M. truncatula_AC124967_17.5#1 | 2234 | 2235 |
| M. truncatula_AC152424_21.4#1 | 2236 | 2237 |
| M. truncatula_AC152424_22.4#1 | 2238 | 2239 |
| M. truncatula_AC186199_6.5#1 | 2240 | 2241 |
| O. sativa_TC322544#1 | 2242 | 2243 |
| O. sativa_TC333315#1 | 2244 | 2245 |
| P. patens_TC33761#1 | 2246 | 2247 |
| P. patens_TC42583#1 | 2248 | 2249 |
| P. patens_TC44119#1 | 2250 | 2251 |
| P. patens_TC51099#1 | 2252 | 2253 |
| P. trichocarpa_scaff_158.41#1 | 2254 | 2255 |
| P. trichocarpa_scaff_28.75#1 | 2256 | 2257 |
| P. trichocarpa_scaff_I.2982#1 | 2258 | 2259 |
| P. trichocarpa_scaff_III.441#1 | 2260 | 2261 |
| P. trichocarpa_scaff_XI.1199#1 | 2262 | 2263 |
| S. lycopersicum_ES895607#1 | 2264 | 2265 |
| S. lycopersicum_TC204920#1 | 2266 | 2267 |
| TM-C_23062; C_; #1 | 2268 | 2269 |
| TM-C_24207; C_; PL; O.#1 | 2270 | 2271 |
| TM-C_25713; C_; #1 | 2272 | 2273 |
| TM-C_26635; C_; GL; A.#1 | 2274 | 2275 |
| TM-C_49318; C_; GL; A.#1 | 2276 | 2277 |
| Z. mays_ZM07MC00881_57442342@880#1 | 2278 | 2279 |
| Z. mays_ZM07MSbpsHQ_59325429.r01@42013#1 | 2280 | 2281 |
| Z. mays_ZM07MSbpsHQ_65311827.f01@48806#1 | 2282 | 2283 |

[0686] Sequences have been tentatively assembled and publicly disclosed by research institutions, such as The Institute for Genomic Research (TIGR; beginning with TA). The Eukaryotic Gene Orthologs (EGO) database may be used to identify such related sequences, either by keyword search or by using the BLAST algorithm with the nucleic acid sequence or polypeptide sequence of interest. Special nucleic acid sequence databases have been created for particular organisms, such as by the Joint Genome Institute. Furthermore, access to proprietary databases, has allowed the identification of novel nucleic acid and polypeptide sequences.

### 4. SAUR Polypeptides, or SYNP Polypeptides, or Fusion Proteins of SAUR Polypeptides and SYNP Polypeptides

[0687] Table A4 provides a list of nucleic acid sequences related to SEQ ID NO: 1163 and SEQ ID NO: 1164.

TABLE A4
Examples of SAUR polypeptides:

| | Nucleic acid | Polypeptide |
|---|---|---|
| Name (AGI code or gene model) | SEQ ID NO: | SEQ ID NO: |
| AT2G21210 | 1163 | 1164 |
| AT1G75590.1 | 1165 | 1166 |
| AT1G75580.1 | 1167 | 1168 |
| AT1G29430.1 | 1169 | 1170 |
| AT1G29440.1 | 1171 | 1172 |
| AT1G29450.1 | 1173 | 1174 |
| AT1G29460.1 | 1175 | 1176 |
| AT1G29490.1 | 1177 | 1178 |
| AT1G29500.1 | 1179 | 1180 |
| AT1G29510.1 | 1181 | 1182 |
| AT1G29420.1 | 1183 | 1184 |
| AT1G43040.1 | 1185 | 1186 |
| AT1G16510.1 | 1187 | 1188 |
| AT1G20470.1 | 1189 | 1190 |
| AT1G19840.1 | 1191 | 1192 |
| AT2G16580.1 | 1193 | 1194 |
| AT2G21200.1 | 1195 | 1196 |
| AT2G36210.1 | 1197 | 1198 |
| AT2G45210.1 | 1199 | 1200 |
| AT2G42870.1 | 1201 | 1202 |
| AT2G37030.1 | 1203 | 1204 |
| AT2G18010.1 | 1205 | 1206 |
| AT2G24400.1 | 1207 | 1208 |
| AT2G46690.1 | 1209 | 1210 |
| AT3G03850.1 | 1211 | 1212 |
| AT3G03840.1 | 1213 | 1214 |
| AT3G03830.1 | 1215 | 1216 |
| AT3G03820.1 | 1217 | 1218 |
| AT3G61900.1 | 1219 | 1220 |
| AT3G51200.1 | 1221 | 1222 |
| AT3G43120.1 | 1223 | 1224 |
| AT3G09870.1 | 1225 | 1226 |
| AT3G20220.1 | 1227 | 1228 |
| AT3G12830.1 | 1229 | 1230 |
| AT3G58850.1 | 1231 | 1232 |
| AT3G60690.1 | 1233 | 1234 |
| AT3G53250.1 | 1235 | 1236 |
| AT4G34770.1 | 1237 | 1238 |
| AT4G34780.1 | 1239 | 1240 |
| AT4G34790.1 | 1241 | 1242 |
| AT4G34800.1 | 1243 | 1244 |
| AT4G34810.1 | 1245 | 1246 |
| AT4G13790.1 | 1247 | 1248 |
| AT4G31320.1 | 1249 | 1250 |
| AT4G09530.1 | 1251 | 1252 |
| AT4G00880.1 | 1253 | 1254 |
| AT4G36110.1 | 1255 | 1256 |
| AT5G03310.1 | 1257 | 1258 |
| AT5G18060.1 | 1259 | 1260 |
| AT5G18010.1 | 1261 | 1262 |
| AT5G18020.1 | 1263 | 1264 |
| AT5G18030.1 | 1265 | 1266 |
| AT5G18050.1 | 1267 | 1268 |
| AT5G42410.1 | 1269 | 1270 |
| AT5G50760.1 | 1271 | 1272 |
| AT5G53590.1 | 1273 | 1274 |
| AT5G27780.1 | 1275 | 1276 |
| AT5G20810.2 | 1277 | 1278 |
| AT5G20820.1 | 1279 | 1280 |
| AT1G72430.1 | 1281 | 1282 |
| AT1G76190.1 | 1283 | 1284 |
| AT1G79130.1 | 1285 | 1286 |
| AT1G19830.1 | 1287 | 1288 |
| AT1G56150.1 | 1289 | 1290 |
| AT2G21220.1 | 1291 | 1292 |
| AT4G22620.1 | 1293 | 1294 |
| AT4G12410.1 | 1295 | 1296 |
| AT4G34750.1 | 1297 | 1298 |
| AT4G34760.1 | 1299 | 1300 |
| AT4G38840.1 | 1301 | 1302 |
| AT4G38850.1 | 1303 | 1304 |
| AT4G38860.1 | 1305 | 1306 |
| AT5G66260.1 | 1307 | 1308 |
| AT5G18080.1 | 1309 | 1310 |
| AT5G10990.1 | 1311 | 1312 |
| AT2G28085.1 | 1313 | 1314 |
| AT3G12955.1 | 1315 | 1316 |
| AT3G03847.1 | 1317 | 1318 |
| AT1G17345.1 | 1319 | 1320 |
| AT5G20810.2 | 1321 | 1322 |
| AT4G38825.1 | 1323 | 1324 |
| A. formosa_TA10626_338618 | 1325 | 1326 |
| A. formosa_TA19524_338618 | 1327 | 1328 |
| A. hypogaea_EE125424 | 1329 | 1330 |
| A. hypogaea_EG029475 | 1331 | 1332 |
| A. majus_AJ787925 | 1333 | 1334 |
| A. majus_AJ789609 | 1335 | 1336 |
| A. majus_AJ792146 | 1337 | 1338 |
| A. majus_AJ793092 | 1339 | 1340 |
| A. stenosperma_EH042215 | 1341 | 1342 |
| A. stenosperma_EH042858 | 1343 | 1344 |
| A. stenosperma_EH044560 | 1345 | 1346 |
| B. vulgaris_EG549451 | 1347 | 1348 |
| B. vulgaris_EG551164 | 1349 | 1350 |
| C. annuum_AF492625 | 1351 | 1352 |
| C. annuum_AF492626 | 1353 | 1354 |
| C. annuum_AF492628 | 1355 | 1356 |
| C. endivia_EL370469 | 1357 | 1358 |
| C. endivia_EL370631 | 1359 | 1360 |
| C. endivia_TA1177_114280 | 1361 | 1362 |
| C. endivia_TA539_114280 | 1363 | 1364 |
| C. intybus_EH692435 | 1365 | 1366 |
| C. intybus_EH703830 | 1367 | 1368 |
| C. intybus_EH706838 | 1369 | 1370 |
| C. intybus_TA1426_13427 | 1371 | 1372 |
| C. maculosa_EH742386 | 1373 | 1374 |
| C. maculosa_EH742856 | 1375 | 1376 |
| C. maculosa_EH749319 | 1377 | 1378 |
| C. maculosa_TA4833_215693 | 1379 | 1380 |
| C. reticulata_TA893_85571 | 1381 | 1382 |
| C. tinctorius_EL383021 | 1383 | 1384 |
| C. tinctorius_EL402472 | 1385 | 1386 |
| C. tinctorius_EL404623 | 1387 | 1388 |
| C. tinctorius_EL409357 | 1389 | 1390 |
| C. tinctorius_EL410673 | 1391 | 1392 |
| C. tinctorius_EL511071 | 1393 | 1394 |
| F. vesca_DV439835 | 1395 | 1396 |
| F. vesca_DY671180 | 1397 | 1398 |
| F. vesca_EX674842 | 1399 | 1400 |
| F. vesca_TA11405_57918 | 1401 | 1402 |
| G. hirsutum_DW503615 | 1403 | 1404 |
| G. hirsutum_DW509807 | 1405 | 1406 |
| G. hirsutum_DW512758 | 1407 | 1408 |
| G. hirsutum_DW519665 | 1409 | 1410 |
| G. hirsutum_TA37257_3635 | 1411 | 1412 |
| G. hirsutum_TA38692_3635 | 1413 | 1414 |
| G. hirsutum_TA41018_3635 | 1415 | 1416 |
| G. hybrid_TA4305_18101 | 1417 | 1418 |
| G. max_AW597359 | 1419 | 1420 |
| G. max_BE347326 | 1421 | 1422 |
| G. max_BQ298199 | 1423 | 1424 |
| G. max_CD391803 | 1425 | 1426 |
| G. max_TA64893_3847 | 1427 | 1428 |
| G. max_TA67504_3847 | 1429 | 1430 |
| G. max_TA70411_3847 | 1431 | 1432 |
| G. raimondii_CO102462 | 1433 | 1434 |
| G. raimondii_CO116635 | 1435 | 1436 |
| H. annuus_DY910229 | 1437 | 1438 |
| H. annuus_TA11757_4232 | 1439 | 1440 |
| H. centranthoides_CB088060 | 1441 | 1442 |
| H. exilis_TA2077_400408 | 1443 | 1444 |
| H. exilis_TA3412_400408 | 1445 | 1446 |
| H. exilis_TA3635_400408 | 1447 | 1448 |
| H. paradoxus_EL483081 | 1449 | 1450 |
| H. paradoxus_EL491346 | 1451 | 1452 |
| H. paradoxus_TA5129_73304 | 1453 | 1454 |
| H. petiolaris_DY943735 | 1455 | 1456 |
| H. petiolaris_DY952438 | 1457 | 1458 |
| H. petiolaris_DY954041 | 1459 | 1460 |
| H. terminalis_CB076591 | 1461 | 1462 |
| H. tuberosus_EL457421 | 1463 | 1464 |
| H. tuberosus_EL463700 | 1465 | 1466 |
| H. tuberosus_EL465041 | 1467 | 1468 |
| H. tuberosus_EL468225 | 1469 | 1470 |
| H. tuberosus_TA4474_4233 | 1471 | 1472 |
| L. japonicus_AW719590 | 1473 | 1474 |
| L. japonicus_TA9854_34305 | 1475 | 1476 |
| L. perennis_DW080686 | 1477 | 1478 |
| L. perennis_DW081245 | 1479 | 1480 |
| L. perennis_DW083509 | 1481 | 1482 |
| L. perennis_TA3114_43195 | 1483 | 1484 |
| L. saligna_DW047772 | 1485 | 1486 |
| L. saligna_DW053071 | 1487 | 1488 |
| L. saligna_DW067950 | 1489 | 1490 |
| L. saligna_DW070649 | 1491 | 1492 |
| L. saligna_TA3313_75948 | 1493 | 1494 |
| L. sativa_DW127263 | 1495 | 1496 |
| L. sativa_DY980480 | 1497 | 1498 |
| L. sativa_TA10685_4236 | 1499 | 1500 |
| L. sativa_TA10743_4236 | 1501 | 1502 |
| L. sativa_TA4959_4236 | 1503 | 1504 |
| L. serriola_DW112451 | 1505 | 1506 |
| L. serriola_DW116661 | 1507 | 1508 |
| L. serriola_TA3320_75943 | 1509 | 1510 |
| L. serriola_TA4842_75943 | 1511 | 1512 |
| L. usitatissimus_8480 | 1513 | 1514 |
| L. virosa_DW153036 | 1515 | 1516 |
| L. virosa_DW155923 | 1517 | 1518 |
| L. virosa_DW174061 | 1519 | 1520 |
| L. virosa_TA2170_75947 | 1521 | 1522 |
| L. virosa_TA3812_75947 | 1523 | 1524 |
| M. domestica_CO067974 | 1525 | 1526 |
| M. domestica_CO756438 | 1527 | 1528 |
| M. domestica_CX023091 | 1529 | 1530 |
| M. domestica_TA37946_3750 | 1531 | 1532 |
| M. domestica_TA38953_3750 | 1533 | 1534 |
| M. domestica_TA39022_3750 | 1535 | 1536 |
| M. domestica_TA40409_3750 | 1537 | 1538 |
| M. domestica_TA44601_3750 | 1539 | 1540 |
| M. sativa_CO513303 | 1541 | 1542 |
| M. sativa_CO515084 | 1543 | 1544 |
| M. sativa_CO515320 | 1545 | 1546 |
| M. sativa_CO515889 | 1547 | 1548 |
| M. sativa_CO517303 | 1549 | 1550 |
| M. truncatula_BQ150674 | 1551 | 1552 |
| M. truncatula_BQ152587 | 1553 | 1554 |
| M. truncatula_BQ153482 | 1555 | 1556 |
| M. truncatula_BQ157435 | 1557 | 1558 |
| M. truncatula_TA25290_3880 | 1559 | 1560 |
| M. truncatula_TA35769_3880 | 1561 | 1562 |
| N. benthamiana_EH366121 | 1563 | 1564 |
| N. benthamiana_EH368884 | 1565 | 1566 |
| N. benthamiana_EH370704 | 1567 | 1568 |
| N. tabacum_BP137194 | 1569 | 1570 |
| N. tabacum_BP533711 | 1571 | 1572 |
| N. tabacum_DV158716 | 1573 | 1574 |
| N. tabacum_EB427417 | 1575 | 1576 |
| N. tabacum_EB439329 | 1577 | 1578 |
| N. tabacum_EB439347 | 1579 | 1580 |
| O. sativa_OsSAUR1 | 1581 | 1582 |
| O. sativa_OsSAUR10 | 1583 | 1584 |
| O. sativa_OsSAUR11 | 1585 | 1586 |
| O. sativa_OsSAUR12 | 1587 | 1588 |
| O. sativa_OsSAUR13 | 1589 | 1590 |
| O. sativa_OsSAUR14 | 1591 | 1592 |
| O. sativa_OsSAUR15 | 1593 | 1594 |
| O. sativa_OsSAUR16 | 1595 | 1596 |
| O. sativa_OsSAUR17 | 1597 | 1598 |
| O. sativa_OsSAUR18 | 1599 | 1600 |
| O. sativa_OsSAUR19 | 1601 | 1602 |
| O. sativa_OsSAUR2 | 1603 | 1604 |
| O. sativa_OsSAUR20 | 1605 | 1606 |
| O. sativa_OsSAUR21 | 1607 | 1608 |
| O. sativa_OsSAUR22 | 1609 | 1610 |
| O. sativa_OsSAUR23 | 1611 | 1612 |
| O. sativa_OsSAUR24 | 1613 | 1614 |
| O. sativa_OsSAUR25 | 1615 | 1616 |
| O. sativa_OsSAUR26 | 1617 | 1618 |
| O. sativa_OsSAUR27 | 1619 | 1620 |
| O. sativa_OsSAUR28 | 1621 | 1622 |
| O. sativa_OsSAUR29 | 1623 | 1624 |
| O. sativa_OsSAUR3 | 1625 | 1626 |
| O. sativa_OsSAUR30 | 1627 | 1628 |
| O. sativa_OsSAUR31 | 1629 | 1630 |
| O. sativa_OsSAUR32 | 1631 | 1632 |
| O. sativa_OsSAUR33 | 1633 | 1634 |
| O. sativa_OsSAUR34 | 1635 | 1636 |
| O. sativa_OsSAUR35 | 1637 | 1638 |
| O. sativa_OsSAUR36 | 1639 | 1640 |
| O. sativa_OsSAUR37 | 1641 | 1642 |
| O. sativa_OsSAUR38 | 1643 | 1644 |
| O. sativa_OsSAUR39 | 1645 | 1646 |
| O. sativa_OsSAUR4 | 1647 | 1648 |
| O. sativa_OsSAUR40 | 1649 | 1650 |
| O. sativa_OsSAUR41 | 1651 | 1652 |
| O. sativa_OsSAUR42 | 1653 | 1654 |
| O. sativa_OsSAUR44 | 1655 | 1656 |
| O. sativa_OsSAUR45 | 1657 | 1658 |
| O. sativa_OsSAUR46 | 1659 | 1660 |
| O. sativa_OsSAUR47 | 1661 | 1662 |
| O. sativa_OsSAUR48 | 1663 | 1664 |
| O. sativa_OsSAUR49 | 1665 | 1666 |
| O. sativa_OsSAUR5 | 1667 | 1668 |
| O. sativa_OsSAUR51 | 1669 | 1670 |
| O. sativa_OsSAUR52 | 1671 | 1672 |
| O. sativa_OsSAUR53 | 1673 | 1674 |
| O. sativa_OsSAUR54 | 1675 | 1676 |
| O. sativa_OsSAUR55 | 1677 | 1678 |
| O. sativa_OsSAUR56 | 1679 | 1680 |
| O. sativa_OsSAUR57 | 1681 | 1682 |
| O. sativa_OsSAUR58 | 1683 | 1684 |
| O. sativa_OsSAUR6 | 1685 | 1686 |
| O. sativa_OsSAUR7 | 1687 | 1688 |
| O. sativa_OsSAUR8 | 1689 | 1690 |
| O. sativa_OsSAUR9 | 1691 | 1692 |
| P. armeniaca_CV047410 | 1693 | 1694 |
| P. armeniaca_TA4482_36596 | 1695 | 1696 |
| P. ginseng_DV554701 | 1697 | 1698 |
| P. persica_DY646333 | 1699 | 1700 |
| P. persica_TA3244_3760 | 1701 | 1702 |
| P. persica_TA3246_3760 | 1703 | 1704 |
| P. persica_TA8343_3760 | 1705 | 1706 |
| P. sativum_CD860263 | 1707 | 1708 |
| P. trichocarpa_scaff_IV.1273 | 1709 | 1710 |
| P. trichocarpa_scaff_IV.1274 | 1711 | 1712 |
| P. trichocarpa_scaff_IV.1275 | 1713 | 1714 |
| P. trichocarpa_scaff_IV.1277 | 1715 | 1716 |
| P. trichocarpa_scaff_IV.1278 | 1717 | 1718 |
| P. trichocarpa_scaff_IV.1283 | 1719 | 1720 |
| P. trichocarpa_scaff_IX.408 | 1721 | 1722 |
| P. trichocarpa_scaff_IX.410 | 1723 | 1724 |
| P. trichocarpa_scaff_IX.412 | 1725 | 1726 |
| P. trichocarpa_scaff_IX.414 | 1727 | 1728 |
| P. vulgaris_CV540653 | 1729 | 1730 |
| P. vulgaris_TA5174_3885 | 1731 | 1732 |
| P. vulgaris_TA5755_3885 | 1733 | 1734 |
| R. communis_EE260652 | 1735 | 1736 |
| R. communis_TA1427_3988 | 1737 | 1738 |
| R. communis_TA1793_3988 | 1739 | 1740 |
| R. communis_TA4032_3988 | 1741 | 1742 |
| R. communis_TA4537_3988 | 1743 | 1744 |
| S. lycopersicum_AI772038 | 1745 | 1746 |
| S. lycopersicum_BG133762 | 1747 | 1748 |
| S. lycopersicum_BI925420 | 1749 | 1750 |
| S. lycopersicum_BP891299 | 1751 | 1752 |
| S. lycopersicum_TA47646_4081 | 1753 | 1754 |
| S. lycopersicum_TA51451_4081 | 1755 | 1756 |
| S. lycopersicum_TA55498_4081 | 1757 | 1758 |
| S. rebaudiana_BG524629 | 1759 | 1760 |
| S. tuberosum_BQ506350 | 1761 | 1762 |
| S. tuberosum_CV469819 | 1763 | 1764 |
| S. tuberosum_CV497917 | 1765 | 1766 |
| S. tuberosum_CV500881 | 1767 | 1768 |
| S. tuberosum_CV506321 | 1769 | 1770 |
| S. tuberosum_DN921670 | 1771 | 1772 |
| S. tuberosum_TA40200_4113 | 1773 | 1774 |
| T. erecta_1962 | 1775 | 1776 |
| T. erecta_3566 | 1777 | 1778 |
| T. erecta_6288 | 1779 | 1780 |
| T. erecta_684 | 1781 | 1782 |
| T. halophila_EC599448 | 1783 | 1784 |
| T. halophila_EC599895 | 1785 | 1786 |
| T. kok-saghyz_DR398853 | 1787 | 1788 |
| T. kok-saghyz_DR399601 | 1789 | 1790 |
| T. kok-saghyz_DR400973 | 1791 | 1792 |
| T. kok-saghyz_DR402050 | 1793 | 1794 |
| T. kok-saghyz_TA924_333970 | 1795 | 1796 |
| V. vinifera_EC943632 | 1797 | 1798 |
| V. vinifera_EC944862 | 1799 | 1800 |
| V. vinifera_EC955742 | 1801 | 1802 |
| V. vinifera_EC990676 | 1803 | 1804 |
| V. vinifera_EE085076 | 1805 | 1806 |
| V. vinifera_TA50539_29760 | 1807 | 1808 |
| V. vinifera_TA51081_29760 | 1809 | 1810 |
| V. vinifera_TA53202_29760 | 1811 | 1812 |

[0688] Sequences have been tentatively assembled and publicly disclosed by research institutions, such as The Institute for Genomic Research (TIGR; beginning with TA). The Eukaryotic Gene Orthologs (EGO) database may be used to identify such related sequences, either by keyword search or by using the BLAST algorithm with the nucleic acid sequence or polypeptide sequence of interest. Special nucleic acid sequence databases have been created for particular organisms, such as by the Joint Genome Institute. Furthermore, access to proprietary databases, has allowed the identification of novel nucleic acid and polypeptide sequences.

### 5. Dehydroascorbate Reductase (DHAR) Polypeptides

[0689] Table A5 provides a list of nucleic acid sequences related to SEQ ID NO 1957 and SEQ ID NO 1958.

TABLE A5
Examples of DHAR nucleic acids and polypeptides:

| | Nucleic acid | Polypeptide |
|---|---|---|
| Name | SEQ ID NO: | SEQ ID NO: |
| A. majus_TA5689_4151 | 1957 | 1958 |
| A. thaliana_AT5G16710.1 | 1959 | 1960 |
| Aquilegia_sp_TC22354 | 1961 | 1962 |
| B. juncea_AF536329 | 1963 | 1964 |
| B. napus_TC90979 | 1965 | 1966 |
| B. oleracea_AB125638 | 1967 | 1968 |
| B. vulgaris_TA8095_161934 | 1969 | 1970 |
| C. canephora_TC4074 | 1971 | 1972 |
| C. maculosa_TA559_215693 | 1973 | 1974 |
| C. sinensis_TC723 | 1975 | 1976 |
| C. solstitialis_TA2280_347529 | 1977 | 1978 |
| C. tinctorius_TA1280_4222 | 1979 | 1980 |
| G. hirsutum_TC83927 | 1981 | 1982 |
| G. max_Glyma11g33700.1 | 1983 | 1984 |
| G. max_Glyma18g04510.1 | 1985 | 1986 |
| G. raimondii_TC4866 | 1987 | 1988 |
| H. annuus_TC33319 | 1989 | 1990 |
| H. ciliaris_TA2767_73280 | 1991 | 1992 |
| H. tuberosus_TA3283_4233 | 1993 | 1994 |
| H. vulgare_c62776255 | 1995 | 1996 |
| I. nil_TC1722 | 1997 | 1998 |
| L. japonicus_TC31996 | 1999 | 2000 |
| L. virosa_TA4153_75947 | 2001 | 2002 |
| M. domestica_TC557 | 2003 | 2004 |
| M. truncatula_DQ006811 | 2005 | 2006 |
| N. tabacum_TC17223 | 2007 | 2008 |
| O. sativa_LOC_Os06g12630.1 | 2009 | 2010 |
| P. trichocarpa_EF146363 | 2011 | 2012 |
| P. trifoliata_CV707148 | 2013 | 2014 |
| R. communis_TA3568_3988 | 2015 | 2016 |
| S. bicolor_Sb10g008310.1 | 2017 | 2018 |
| S. lycopersicum_AY971874 | 2019 | 2020 |
| S. oleracea_AF195783 | 2021 | 2022 |
| S. tuberosum_TC165600 | 2023 | 2024 |
| T. aestivum_TC328219 | 2025 | 2026 |
| Triphysaria_sp_TC13209 | 2027 | 2028 |
| Triphysaria_sp_TC4796 | 2029 | 2030 |
| V. vinifera_GSVIVT00032988001 | 2031 | 2032 |
| Z. mays_TC441527 | 2033 | 2034 |
| A. capillaris_DV853556 | 2035 | 2036 |
| A. thaliana_AT1G19570.1 | 2037 | 2038 |
| A. thaliana_AT1G75270.1 | 2039 | 2040 |
| A. thaliana_AT5G36270.1 | 2041 | 2042 |
| Aquilegia_sp_TC25677 | 2043 | 2044 |
| B. napus_TC63930 | 2045 | 2046 |
| B. napus_TC66670 | 2047 | 2048 |
| B. oleracea_TA5797_3712 | 2049 | 2050 |
| B. rapa_TA5347_3711 | 2051 | 2052 |
| C. annuum_TC8154 | 2053 | 2054 |
| C. aurantium_TA900_43166 | 2055 | 2056 |
| C. canephora_DV706668 | 2057 | 2058 |
| C. clementina_DY270995 | 2059 | 2060 |
| C. intybus_TA3336_13427 | 2061 | 2062 |
| C. longa_TA1900_136217 | 2063 | 2064 |
| C. maculosa_TA1265_215693 | 2065 | 2066 |
| C. reticulata_TA1023_85571 | 2067 | 2068 |
| C. sinensis_EY698722 | 2069 | 2070 |
| C. solstitialis_EH753758 | 2071 | 2072 |
| C. tetragonoloba_TA307_3832 | 2073 | 2074 |
| C. tinctorius_TA1301_4222 | 2075 | 2076 |
| D. sophia_BU238196 | 2077 | 2078 |
| E. coracana_TA104_4511 | 2079 | 2080 |
| E. esula_TC2212 | 2081 | 2082 |
| F. arundinacea_TC6317 | 2083 | 2084 |
| F. vesca_TA9444_57918 | 2085 | 2086 |
| G. arboreum_TA6227_29729 | 2087 | 2088 |
| G. hirsutum_TC94056 | 2089 | 2090 |
| G. max_Glyma10g43730.1 | 2091 | 2092 |
| G. max_Glyma20g38440.1 | 2093 | 2094 |
| G. raimondii_TC7963 | 2095 | 2096 |
| H. annuus_TC29862 | 2097 | 2098 |
| H. ciliaris_TA629_73280 | 2099 | 2100 |
| H. exilis_TA561_400408 | 2101 | 2102 |
| H. paradoxus_EL479335 | 2103 | 2104 |
| H. tuberosus_TA3353_4233 | 2105 | 2106 |
| H. vulgare_gi_21150952 | 2107 | 2108 |
| I. nil_TC10530 | 2109 | 2110 |
| L. japonicus_TC24095 | 2111 | 2112 |
| L. perennis_TA1555_43195 | 2113 | 2114 |
| L. saligna_TA1997_75948 | 2115 | 2116 |
| L. serriola_TC1476 | 2117 | 2118 |
| L. usitatissimum_c61921689 | 2119 | 2120 |
| L. virosa_DW147931 | 2121 | 2122 |
| M. crystallinum_TC8343 | 2123 | 2124 |
| M. domestica_TC224 | 2125 | 2126 |
| M. esculenta_TA5449_3983 | 2127 | 2128 |
| M. truncatula_BT051804 | 2129 | 2130 |
| N. tabacum_EB428961 | 2131 | 2132 |
| O. minuta_TA741_63629 | 2133 | 2134 |
| O. rufipogon_CT841597 | 2135 | 2136 |
| O. sativa_AB037970 | 2137 | 2138 |
| P. euphratica_TA2242_75702 | 2139 | 2140 |
| P. hybrida_TC2952 | 2141 | 2142 |
| P. persica_TC1266 | 2143 | 2144 |
| P. tremula_TA7101_113636 | 2145 | 2146 |
| P. trichocarpa_563837 | 2147 | 2148 |
| P. trichocarpa_833836 | 2149 | 2150 |
| P. trifoliata_TA5514_37690 | 2151 | 2152 |
| P. virgatum_TA3280_38727 | 2153 | 2154 |
| R. communis_EE257079 | 2155 | 2156 |
| S. aethnensis_TA30_121540 | 2157 | 2158 |
| S. bicolor_Sb09g001690.1 | 2159 | 2160 |
| S. bicolor_Sb09g001700.1 | 2161 | 2162 |
| S. indicum_DQ287974 | 2163 | 2164 |
| S. lycopersicum_TC196877 | 2165 | 2166 |
| S. tuberosum_TC167795 | 2167 | 2168 |
| T. aestivum_CA484858 | 2169 | 2170 |
| T. aestivum_TC278165 | 2171 | 2172 |
| T. hispida_TA863_189793 | 2173 | 2174 |
| T. kok-saghyz_TA971_333970 | 2175 | 2176 |
| T. officinale_TA193_50225 | 2177 | 2178 |
| T. salsuginea_TA1203_72664 | 2179 | 2180 |
| T. turgidum_AJ614920 | 2181 | 2182 |
| V. aestivalis_CF355345 | 2183 | 2184 |
| V. vinifera_GSVIVT00029528001 | 2185 | 2186 |
| Z. elegans_AB158512 | 2187 | 2188 |
| Z. mays_EU975087 | 2189 | 2190 |
| Z. mays_TC373023 | 2191 | 2192 |
| Z. mays_ZM07MC18926 | 2193 | 2194 |
| Z. violacea_AB158512 | 2195 | 2196 |
| A. cepa_CF447692 | 2197 | 2198 |
| A. cepa_CF449839 | 2199 | 2200 |
| C. japonica_TA1618_3369 | 2201 | 2202 |
| C. reinhardtii_143082 | 2203 | 2204 |
| C. richardii_CV735137 | 2205 | 2206 |
| C. vulgaris_44999 | 2207 | 2208 |
| C. vulgaris_77112 | 2209 | 2210 |
| Chlorella_143262 | 2211 | 2212 |
| P. bungeana_EU665680 | 2213 | 2214 |
| P. glauca_TA17594_3330 | 2215 | 2216 |
| P. glauca_TA19404_3330 | 2217 | 2218 |
| P. patens_223859 | 2219 | 2220 |
| P. patens_55477 | 2221 | 2222 |
| P. patens_93368 | 2223 | 2224 |
| P. sitchensis_TA10352_3332 | 2225 | 2226 |
| P. taeda_TA10755_3352 | 2227 | 2228 |
| P. taeda_TA6062_3352 | 2229 | 2230 |
| S. moellendorffii_139875 | 2231 | 2232 |
| S. moellendorffii_271409 | 2233 | 2234 |
| T. ruralis_CN201906 | 2235 | 2236 |
| W. mirabilis_TA1159_3377 | 2237 | 2238 |

[0690] Sequences have been tentatively assembled and publicly disclosed by research institutions, such as The Institute for Genomic Research (TIGR; beginning with TA). The Eukaryotic Gene Orthologs (EGO) database may be used to identify such related sequences, either by keyword search or by using the BLAST algorithm with the nucleic acid sequence or polypeptide sequence of interest. Special nucleic acid sequence databases have been created for particular organisms, such as by the Joint Genome Institute. Furthermore, access to proprietary databases, has allowed the identification of novel nucleic acid and polypeptide sequences.

### Example 2

### Alignment of Sequences Related to the Polypeptide Sequences Used in the Methods of the Invention

### 1. Glutamate Dehydrogenase (GDH) Polypeptides

[0691] A phylogenetic tree of GDH polypeptides (FIG. 3) was constructed after aligning GDH polypeptides with MUSCLE (Edgar (2004), Nucleic Acids Research 32(5): 1792-97). The Neighbour-Joining tree was calculated using Quick-Tree (Howe et al. (2002), Bioinformatics 18(11): 1546-7). A circular phylogram was drawn using Dendroscope (Huson et al. (2007), BMC Bioinformatics 8(1):460). The tree shows a clear delineation of subgroups within the GDH polypeptides: Class I, Class II, algal and moss GDH proteins. Within Class I, the alpha and beta subunit polypeptides cluster together. Table A above lists the subgroup to which each of the sequences belongs to.

[0692] The sequence conservation is high when proteins of a subgroup are aligned, as shown in FIG. 2; alignments were made using the ClustalW 2.0 algorithm of progressive alignment (Thompson et al. (1997) Nucleic Acids Res 25:4876-4882; Chema et al. (2003). Nucleic Acids Res 31:3497-3500) with standard setting (slow alignment, similarity matrix: Gonnet, gap opening penalty 10, gap extension penalty: 0.2). Minor manual editing was done to further optimise the alignment. From these alignments a person skilled in the art can easily derive motifs for identifying other GDH proteins for use in the methods of this invention, in particular amino acid stretches comprising identical amino acids (labelled with an asterisk), or with conserved substitutions (labelled with a colon or a dot) are useful.

### 2. Fasciclin-Like AGP (FLAB) Polypeptides

[0693] Alignment of polypeptide sequences is performed using the ClustalW 2.0 algorithm of progressive alignment (Thompson et al. (1997) Nucleic Acids Res 25:4876-4882; Chema et al. (2003). Nucleic Acids Res 31:3497-3500) with standard setting (slow alignment, similarity matrix: Gonnet (or Blosum 62 (if polypeptides are aligned), gap opening penalty 10, gap extension penalty: 0.2).

[0694] A phylogenetic tree of FLA-like polypeptides is constructed using a neighbour-joining clustering algorithm as provided in the AlignX programme from the Vector NTI (Invitrogen).

### 3. Small Auxin-Up RNA (SAUR) Polypeptides

[0695] Alignment of polypeptide sequences is performed using the ClustalW 2.0 algorithm of progressive alignment (Thompson et al. (1997) Nucleic Acids Res 25:4876-4882; Chema et al. (2003). Nucleic Acids Res 31:3497-3500) with standard setting (slow alignment, similarity matrix: Gonnet (or Blosum 62 (if polypeptides are aligned), gap opening penalty 10, gap extension penalty: 0.2). Minor manual editing is done to further optimise the alignment.

### 4. SAUR Polypeptides, or SYNP Polypeptides, or Fusion Proteins of SAUR Polypeptides and SYNP Polypeptides

[0696] Alignment of polypeptide sequences is performed using the ClustalW 2.0 algorithm of progressive alignment (Thompson et al. (1997) Nucleic Acids Res 25:4876-4882; Chema et al. (2003). Nucleic Acids Res 31:3497-3500) with standard setting (slow alignment, similarity matrix: Gonnet (or Blosum 62 (if polypeptides are aligned), gap opening penalty 10, gap extension penalty: 0.2). Minor manual editing is done to further optimise the alignment.

### 5. Dehydroascorbate Reductase (DHAR) Polypeptides

[0697] The alignment was generated using MAFFT (Katoh and Toh (2008)—Briefings in Bioinformatics 9:286-298). A neighbour-joining tree was calculated using Quick-Tree (Howe et al. (2002), Bioinformatics 18(11): 1546-7), 100 bootstrap repetitions. The circular phylogram was drawn using Dendroscope (Huson et al. (2007), BMC Bioinformatics 8(1):460)—FIG. 8. Confidence for 100 bootstrap repetitions is indicated for major branching.

### Example 3

### Calculation of Global Percentage Identity Between Polypeptide Sequences Useful in Performing the Methods of the Invention

[0698] Global percentages of similarity and identity between full length polypeptide sequences useful in performing the methods of the invention were determined using one of the methods available in the art, the MatGAT (Matrix Global Alignment Tool) software (BMC Bioinformatics. 2003 4:29. MatGAT: an application that generates similarity/identity matrices using protein or DNA sequences. Campanella J J, Bitincka L, Smalley J; software hosted by Ledion Bitincka). MatGAT software generates similarity/identity matrices for DNA or protein sequences without needing pre-alignment of the data. The program performs a series of pair-wise alignments using the Myers and Miller global alignment algorithm (with a gap opening penalty of 12, and a gap extension penalty of 2), calculates similarity and identity using for example Blosum 62 (for polypeptides), and then places the results in a distance matrix. Sequence similarity is shown in the bottom half of the dividing line and sequence identity is shown in the top half of the diagonal dividing line.

### 1. Glutamate Dehydrogenase (GDH) Polypeptides

[0699] Parameters used in the comparison were:
[0700] Scoring matrix: Blosum62
[0701] First Gap: 12
[0702] Extending gap: 2

[0703] Results of the analysis are shown in Table B1 for the global similarity and identity over the full length of the polypeptide sequences from the Class I and mosses subgroups. Percentage identity is given above the diagonal and percentage similarity is given below the diagonal.

TABLE B1
MatGAT results for global similarity and identity over the full length of the
polypeptide sequences within the Class I and mosses subgroups.

| | 1 | 2 | 3 | 4 | 5 | 6 | 7 | 8 | 9 | 10 | 11 | 12 |
|---|---|---|---|---|---|---|---|---|---|---|---|---|
| 1. AT5G07440 | | 95.4 | 86.4 | 87.6 | 86.4 | 86.6 | 88.6 | 82.7 | 86.1 | 82.5 | 81.0 | 86.9 |
| 2. AB066298 | 99.3 | | 85.2 | 88.8 | 85.7 | 87.6 | 89.8 | 82.5 | 86.1 | 82.5 | 81.3 | 88.3 |
| 3. TA305_347529 | 96.1 | 95.1 | | 86.9 | 82.3 | 85.4 | 87.6 | 80.0 | 82.2 | 80.8 | 79.6 | 84.9 |
| 4. TA29927_3635 | 95.4 | 95.1 | 94.2 | | 85.9 | 90.8 | 98.5 | 83.7 | 85.4 | 84.5 | 83.0 | 88.6 |
| 5. TA64336_3847 | 92.7 | 92.7 | 92.2 | 92.5 | | 85.2 | 86.9 | 82.8 | 90.5 | 82.6 | 81.3 | 84.0 |
| 6. TA10049_29730 | 95.1 | 94.9 | 94.2 | 96.6 | 92.2 | | 91.7 | 82.0 | 84.2 | 82.8 | 81.8 | 87.3 |
| 7. TA10097_29730 | 96.1 | 95.9 | 95.1 | 98.8 | 93.2 | 97.1 | | 83.9 | 86.4 | 84.7 | 83.0 | 89.5 |
| 8. TA34363_4513 | 92.2 | 91.7 | 90.5 | 92.7 | 90.8 | 91.2 | 92.7 | | 79.6 | 92.0 | 86.4 | 81.8 |
| 9. CR931735_5.4 | 93.7 | 93.4 | 92.9 | 93.2 | 95.4 | 92.9 | 94.2 | 90.0 | | 79.9 | 77.9 | 83.2 |
| 10. Os04g45970.1 | 92.2 | 91.5 | 90.8 | 92.5 | 91.0 | 91.3 | 92.5 | 97.3 | 90.0 | | 86.4 | 84.5 |
| 11. Os02g0650900 | 91.2 | 90.5 | 90.0 | 92.7 | 90.5 | 92.0 | 92.5 | 96.1 | 89.8 | 95.1 | | 80.3 |
| 12. TA199_3690 | 95.9 | 95.4 | 94.9 | 97.3 | 92.5 | 95.9 | 98.1 | 92.5 | 93.7 | 92.7 | 92.5 | |
| 13. TA12661_3352 | 88.8 | 88.6 | 89.1 | 90.3 | 88.8 | 89.1 | 90.5 | 88.8 | 88.3 | 88.8 | 89.3 | 90.0 |
| 14. TA7375_113636 | 95.6 | 95.1 | 94.6 | 97.1 | 92.5 | 95.6 | 97.8 | 92.2 | 93.7 | 92.2 | 92.2 | 99.8 |
| 15. Pt575509 | 95.9 | 95.4 | 94.9 | 97.3 | 92.5 | 95.9 | 98.1 | 92.5 | 93.7 | 92.5 | 92.5 | 100.0 |
| 16. Pt828764 | 95.6 | 95.1 | 95.1 | 96.1 | 93.2 | 95.4 | 96.8 | 92.5 | 93.4 | 92.5 | 92.0 | 98.8 |
| 17. Sb5286803 | 92.5 | 91.7 | 91.5 | 93.2 | 91.7 | 92.0 | 93.2 | 97.6 | 90.5 | 96.8 | 95.6 | 93.2 |
| 18. TA48180_4081 | 94.9 | 95.4 | 93.7 | 93.2 | 92.2 | 93.7 | 94.2 | 91.5 | 92.7 | 91.0 | 90.5 | 94.2 |
| 19. TA70276_4565 | 92.2 | 91.7 | 90.8 | 92.7 | 91.3 | 91.2 | 92.7 | 100.0 | 90.5 | 97.3 | 96.1 | 92.5 |
| 20. TA36948_29760 | 94.4 | 93.9 | 93.4 | 94.2 | 91.3 | 94.6 | 94.9 | 91.2 | 91.7 | 91.3 | 90.0 | 93.9 |
| 21. TA160461_4577 | 92.2 | 91.5 | 90.8 | 92.7 | 91.0 | 91.5 | 92.7 | 97.1 | 90.0 | 96.4 | 95.4 | 92.7 |
| 22. TA8521_338618 | 90.3 | 90.3 | 90.3 | 91.5 | 90.3 | 91.0 | 92.0 | 89.8 | 90.8 | 90.0 | 90.3 | 91.5 |
| 23. TA1966_4686 | 90.8 | 90.5 | 90.3 | 90.8 | 89.6 | 90.3 | 91.2 | 89.3 | 89.5 | 89.8 | 89.1 | 91.2 |
| 24. AT3G03910.1 | 90.5 | 90.0 | 90.3 | 91.5 | 90.8 | 89.5 | 91.7 | 88.1 | 90.0 | 88.3 | 89.3 | 90.8 |
| 25. AT5G18170.1 | 90.8 | 90.5 | 90.0 | 92.0 | 90.5 | 90.5 | 92.0 | 89.5 | 89.8 | 90.0 | 90.0 | 91.0 |
| 26. TA153_347529 | 91.5 | 91.2 | 90.3 | 91.7 | 90.5 | 91.5 | 92.2 | 89.8 | 90.3 | 89.8 | 90.0 | 92.0 |
| 27. Gm0155x00045 | 90.0 | 90.0 | 90.3 | 91.2 | 90.0 | 90.5 | 91.7 | 89.3 | 89.5 | 89.3 | 88.6 | 90.5 |
| 28. TA9810_29730 | 91.5 | 91.0 | 91.0 | 92.9 | 90.5 | 92.2 | 93.4 | 90.5 | 90.8 | 90.3 | 90.8 | 92.7 |
| 29. TA8643_4232 | 91.5 | 91.7 | 90.8 | 92.2 | 90.8 | 92.5 | 92.7 | 90.5 | 90.5 | 90.5 | 91.0 | 92.0 |
| 30. TA1274_73275 | 91.5 | 91.7 | 90.8 | 92.2 | 90.8 | 92.5 | 92.7 | 90.5 | 90.5 | 90.5 | 91.0 | 92.0 |
| 31. TA35352_4513 | 90.5 | 89.8 | 89.8 | 91.5 | 90.5 | 91.5 | 92.0 | 88.8 | 90.8 | 89.3 | 89.8 | 91.5 |
| 32. TA11677_35883 | 91.0 | 90.5 | 90.3 | 92.2 | 89.8 | 91.2 | 92.5 | 90.0 | 89.3 | 90.5 | 89.8 | 91.7 |
| 33. TA3379_3544 | 91.2 | 91.0 | 90.8 | 91.5 | 90.5 | 91.0 | 92.0 | 90.3 | 89.5 | 90.0 | 89.8 | 91.7 |
| 34. AC174375_7.5 | 90.5 | 90.3 | 90.5 | 92.5 | 90.0 | 91.2 | 92.7 | 89.1 | 89.8 | 89.6 | 89.8 | 91.7 |
| 35. TA21862_3880 | 90.8 | 90.3 | 90.3 | 91.2 | 89.3 | 90.0 | 91.5 | 89.8 | 89.1 | 89.3 | 88.6 | 91.0 |
| 36. TA18464_4097 | 91.0 | 91.0 | 90.5 | 92.7 | 90.5 | 91.7 | 92.9 | 90.0 | 90.5 | 91.0 | 90.5 | 91.7 |
| 37. TA2019_39350 | 90.3 | 90.0 | 89.1 | 91.5 | 89.8 | 90.8 | 91.7 | 88.8 | 89.3 | 88.8 | 88.8 | 90.8 |
| 38. Os03g0794500 | 90.8 | 90.0 | 90.5 | 91.5 | 90.5 | 91.0 | 92.0 | 89.3 | 90.8 | 89.6 | 89.8 | 91.5 |
| 39. TA14146_3330 | 90.5 | 90.5 | 90.5 | 91.5 | 91.7 | 91.0 | 92.2 | 90.0 | 91.0 | 90.3 | 90.3 | 92.0 |
| 40. TA13960_3332 | 90.8 | 90.8 | 90.3 | 91.2 | 91.5 | 90.8 | 92.0 | 90.0 | 90.8 | 90.0 | 90.0 | 91.7 |
| 41. Pt571209 | 91.0 | 90.5 | 90.5 | 92.0 | 90.0 | 90.5 | 92.5 | 90.0 | 90.3 | 89.8 | 90.0 | 92.0 |
| 42. Pt826140 | 91.2 | 90.3 | 90.0 | 91.5 | 90.5 | 90.5 | 92.0 | 90.3 | 90.3 | 89.8 | 90.5 | 91.5 |
| 43. TA35879_4081 | 91.2 | 91.0 | 90.8 | 91.5 | 89.3 | 90.3 | 91.7 | 89.8 | 88.6 | 90.8 | 89.8 | 91.0 |
| 44. TA29537_4113 | 91.5 | 91.2 | 91.0 | 91.5 | 89.6 | 90.5 | 91.7 | 90.0 | 88.8 | 91.0 | 90.0 | 91.2 |
| 45. TA69991_4565 | 90.5 | 89.8 | 89.8 | 91.5 | 90.5 | 91.5 | 92.0 | 88.8 | 90.8 | 89.3 | 89.8 | 91.5 |
| 46. GSVIVT25474001 | 91.0 | 90.5 | 90.0 | 91.2 | 90.5 | 90.8 | 91.7 | 90.0 | 90.3 | 89.8 | 90.0 | 91.0 |
| 47. TA43933_29760 | 90.3 | 89.8 | 89.3 | 90.5 | 89.8 | 90.0 | 91.0 | 89.3 | 89.1 | 89.1 | 89.3 | 90.3 |
| 48. AY106054 | 90.8 | 90.3 | 90.0 | 91.0 | 90.3 | 90.3 | 91.5 | 88.3 | 90.5 | 88.6 | 88.6 | 91.5 |
| 49. TA1057_3197 | 90.0 | 89.8 | 88.1 | 89.5 | 89.1 | 89.8 | 90.3 | 89.5 | 89.3 | 88.6 | 88.8 | 89.3 |
| 50. Pp126976 | 87.8 | 87.3 | 85.9 | 87.8 | 85.7 | 87.8 | 88.3 | 86.4 | 85.6 | 86.2 | 86.4 | 87.8 |
| 51. Sm78170 | 87.1 | 87.1 | 86.4 | 87.8 | 86.4 | 88.1 | 88.3 | 86.1 | 87.6 | 86.2 | 85.6 | 87.6 |
| | 13 | 14 | 15 | 16 | 17 | 18 | 19 | 20 | 21 | 22 | 23 | 24 |
| 1. AT5G07440 | 76.9 | 86.6 | 87.3 | 86.6 | 82.2 | 88.6 | 82.5 | 85.9 | 80.3 | 78.8 | 79.8 | 78.6 |
| 2. AB066298 | 76.6 | 87.6 | 88.3 | 88.3 | 81.3 | 89.3 | 82.2 | 87.8 | 79.8 | 78.3 | 80.3 | 78.6 |
| 3. TA305_347529 | 76.2 | 84.7 | 85.4 | 85.6 | 80.0 | 85.6 | 80.5 | 84.2 | 77.6 | 79.8 | 79.8 | 80.0 |
| 4. TA29927_3635 | 77.6 | 88.3 | 89.1 | 88.6 | 83.5 | 86.9 | 84.2 | 88.1 | 82.0 | 81.5 | 80.8 | 80.8 |
| 5. TA64336_3847 | 77.2 | 84.0 | 84.5 | 84.5 | 82.0 | 85.9 | 82.3 | 84.0 | 80.6 | 80.3 | 80.1 | 79.4 |
| 6. TA10049_29730 | 76.6 | 87.1 | 87.8 | 88.6 | 82.7 | 86.6 | 82.7 | 87.6 | 80.8 | 81.5 | 81.0 | 80.5 |
| 7. TA10097_29730 | 78.1 | 89.3 | 90.0 | 89.5 | 83.7 | 87.8 | 84.4 | 88.8 | 82.2 | 82.0 | 81.3 | 81.5 |
| 8. TA34363_4513 | 78.1 | 81.5 | 82.2 | 82.2 | 91.2 | 81.8 | 98.3 | 82.0 | 89.8 | 80.3 | 79.6 | 76.9 |
| 9. CR931735_5.4 | 75.4 | 83.2 | 83.7 | 83.7 | 78.6 | 84.7 | 79.1 | 83.7 | 78.3 | 80.5 | 80.3 | 78.8 |
| 10. Os04g45970.1 | 78.4 | 83.5 | 84.2 | 83.7 | 90.3 | 82.3 | 91.7 | 82.3 | 88.3 | 80.3 | 81.3 | 78.9 |
| 11. Os02g0650900 | 76.4 | 80.0 | 80.8 | 81.5 | 86.4 | 81.5 | 87.6 | 80.3 | 85.4 | 79.3 | 77.9 | 78.6 |
| 12. TA199_3690 | 77.4 | 98.8 | 99.5 | 94.6 | 81.5 | 86.6 | 82.5 | 87.8 | 79.6 | 79.8 | 80.0 | 79.1 |
| 13. TA12661_3352 | | 76.6 | 77.4 | 79.1 | 78.1 | 77.1 | 78.8 | 75.9 | 75.7 | 77.6 | 78.1 | 76.9 |
| 14. TA7375_113636 | 89.8 | | 99.3 | 94.4 | 81.3 | 86.4 | 82.2 | 87.1 | 79.3 | 79.8 | 79.6 | 79.1 |
| 15. Pt575509 | 90.0 | 99.8 | | 95.1 | 82.0 | 87.1 | 83.0 | 87.6 | 80.0 | 80.3 | 80.0 | 79.6 |
| 16. Pt828764 | 90.5 | 98.5 | 98.8 | | 83.2 | 87.6 | 83.0 | 86.9 | 81.0 | 80.0 | 80.0 | 79.8 |
| 17. Sb5286803 | 89.8 | 92.9 | 93.2 | 93.4 | | 81.3 | 90.3 | 81.8 | 95.4 | 81.3 | 79.8 | 78.6 |
| 18. TA48180_4081 | 89.3 | 93.9 | 94.2 | 94.6 | 92.2 | | 82.2 | 85.4 | 79.3 | 78.8 | 80.8 | 79.1 |
| 19. TA70276_4565 | 89.3 | 92.2 | 92.5 | 92.5 | 97.6 | 91.2 | | 81.5 | 88.3 | 80.3 | 79.1 | 77.9 |
| 20. TA36948_29760 | 88.3 | 93.9 | 93.9 | 93.7 | 91.5 | 92.9 | 91.2 | | 80.8 | 79.6 | 80.0 | 79.1 |
| 21. TA160461_4577 | 90.0 | 92.5 | 92.7 | 92.9 | 99.0 | 91.7 | 97.3 | 90.8 | | 80.5 | 79.6 | 78.3 |
| 22. TA8521_338618 | 90.0 | 91.5 | 91.5 | 90.5 | 90.5 | 89.8 | 90.3 | 89.5 | 90.5 | | 87.6 | 87.1 |
| 23. TA1966_4686 | 90.0 | 91.2 | 91.2 | 90.5 | 90.5 | 90.5 | 89.5 | 90.3 | 90.8 | 95.6 | | 84.2 |
| 24. AT3G03910.1 | 89.3 | 90.8 | 90.8 | 90.0 | 89.1 | 90.3 | 88.6 | 89.3 | 88.8 | 94.6 | 93.2 | |
| 25. AT5G18170.1 | 90.0 | 91.0 | 91.0 | 90.8 | 90.3 | 90.0 | 90.0 | 90.0 | 90.3 | 95.1 | 92.9 | 97.3 |
| 26. TA153_347529 | 89.5 | 91.7 | 92.0 | 91.5 | 90.3 | 91.2 | 90.3 | 89.1 | 89.8 | 95.1 | 93.9 | 95.1 |
| 27. Gm0155x00045.1 | 89.5 | 90.5 | 90.5 | 90.5 | 90.3 | 89.5 | 89.8 | 89.8 | 90.0 | 94.9 | 93.4 | 96.8 |
| 28. TA9810_29730 | 91.5 | 92.5 | 92.7 | 92.0 | 91.7 | 90.3 | 91.0 | 90.0 | 91.0 | 97.1 | 94.6 | 96.1 |
| 29. TA8643_4232 | 89.8 | 91.7 | 92.0 | 91.7 | 91.0 | 90.8 | 91.0 | 89.8 | 90.5 | 95.6 | 94.2 | 94.6 |
| 30. TA1274_73275 | 89.8 | 91.7 | 92.0 | 91.7 | 91.0 | 90.8 | 91.0 | 89.8 | 90.5 | 95.6 | 94.2 | 94.6 |
| 31. TA35352_4513 | 89.8 | 91.5 | 91.5 | 90.5 | 90.8 | 90.5 | 89.3 | 90.0 | 91.0 | 95.4 | 96.4 | 93.4 |
| 32. TA11677_35883 | 89.8 | 91.7 | 91.7 | 90.8 | 90.8 | 89.5 | 90.5 | 89.8 | 90.0 | 94.6 | 93.9 | 95.4 |
| 33. TA3379_3544 | 90.3 | 91.5 | 91.7 | 91.5 | 91.0 | 90.5 | 90.8 | 90.8 | 90.5 | 94.4 | 94.4 | 94.9 |
| 34. AC174375_7.5 | 91.0 | 91.5 | 91.7 | 91.0 | 90.5 | 89.8 | 89.5 | 89.8 | 90.0 | 96.1 | 93.9 | 96.8 |
| 35. TA21862_3880 | 89.8 | 91.0 | 91.0 | 90.5 | 90.3 | 89.1 | 90.3 | 88.8 | 90.0 | 94.6 | 93.2 | 94.9 |
| 36. TA18464_4097 | 91.0 | 91.5 | 91.7 | 91.0 | 91.0 | 90.3 | 90.5 | 90.5 | 90.5 | 95.1 | 94.2 | 95.6 |
| 37. TA2019_39350 | 89.3 | 90.8 | 90.8 | 90.5 | 90.3 | 89.1 | 89.3 | 89.5 | 89.5 | 94.2 | 93.2 | 94.9 |
| 38. Os03g0794500 | 90.5 | 91.5 | 91.5 | 91.0 | 90.8 | 90.3 | 89.8 | 90.5 | 91.5 | 96.1 | 97.3 | 94.2 |
| 39. TA14146_3330 | 92.5 | 91.7 | 92.0 | 92.2 | 90.8 | 90.8 | 90.3 | 89.5 | 90.8 | 95.1 | 92.7 | 93.2 |
| 40. TA13960_3332 | 92.0 | 91.5 | 91.7 | 91.7 | 90.3 | 90.5 | 90.3 | 89.1 | 90.8 | 94.6 | 92.5 | 92.9 |
| 41. Pt571209 | 90.5 | 92.0 | 92.0 | 91.2 | 91.2 | 90.3 | 90.5 | 90.0 | 90.8 | 96.8 | 94.4 | 95.6 |
| 42. Pt826140 | 90.0 | 91.5 | 91.5 | 90.8 | 91.0 | 89.8 | 90.8 | 89.8 | 90.5 | 97.1 | 94.6 | 95.6 |
| 43. TA35879_4081 | 89.5 | 90.8 | 91.0 | 90.8 | 90.3 | 89.8 | 90.3 | 89.5 | 89.8 | 93.2 | 93.2 | 94.2 |
| 44. TA29537_4113 | 89.8 | 91.0 | 91.2 | 91.0 | 90.5 | 90.0 | 90.5 | 89.8 | 90.0 | 93.4 | 93.4 | 94.4 |
| 45. TA69991_4565 | 89.8 | 91.5 | 91.5 | 90.5 | 90.8 | 90.5 | 89.3 | 90.0 | 91.0 | 95.4 | 96.4 | 93.7 |
| 46. GSVIVT25474001 | 90.8 | 91.0 | 91.0 | 90.8 | 90.8 | 90.0 | 90.5 | 89.5 | 90.8 | 96.4 | 95.1 | 95.9 |
| 47. TA43933_29760 | 90.0 | 90.3 | 90.3 | 90.0 | 90.0 | 89.3 | 89.8 | 88.8 | 90.0 | 95.1 | 94.4 | 95.1 |
| 48. AY106054 | 89.3 | 91.5 | 91.5 | 90.8 | 89.3 | 90.0 | 88.8 | 90.0 | 89.5 | 93.9 | 96.1 | 92.9 |
| 49. TA1057_3197 | 89.3 | 89.1 | 89.3 | 89.1 | 89.5 | 89.1 | 89.5 | 88.3 | 89.3 | 90.3 | 90.5 | 89.3 |
| 50. Pp126976 | 85.4 | 87.6 | 87.8 | 87.3 | 86.4 | 87.1 | 86.6 | 85.9 | 86.1 | 87.8 | 86.6 | 86.4 |
| 51. Sm78170 | 86.1 | 87.6 | 87.6 | 87.3 | 86.6 | 86.9 | 86.1 | 86.4 | 85.9 | 89.8 | 88.3 | 87.1 |
| | 25 | 26 | 27 | 28 | 29 | 30 | 31 | 32 | 33 | 34 | 5 | 36 |
| 1. AT5G07440 | 80.5 | 78.8 | 79.8 | 80.5 | 79.8 | 79.8 | 80.3 | 79.6 | 80.5 | 79.3 | 81.0 | 79.8 |
| 2. AB066298 | 80.5 | 79.1 | 79.8 | 80.5 | 79.3 | 79.3 | 80.0 | 79.3 | 80.8 | 79.1 | 80.8 | 79.6 |
| 3. TA305_347529 | 79.8 | 79.1 | 79.8 | 80.8 | 78.6 | 78.6 | 80.5 | 80.5 | 79.3 | 78.8 | 79.8 | 80.5 |
| 4. TA29927_3635 | 81.3 | 81.3 | 82.0 | 85.2 | 81.3 | 81.3 | 81.8 | 81.0 | 80.8 | 82.2 | 81.3 | 81.3 |
| 5. TA64336_3847 | 81.3 | 80.8 | 80.6 | 82.0 | 81.3 | 81.3 | 81.1 | 80.3 | 80.6 | 79.1 | 79.9 | 81.1 |
| 6. TA10049_29730 | 80.3 | 81.5 | 81.3 | 83.0 | 81.3 | 81.3 | 82.2 | 80.0 | 80.0 | 80.3 | 79.8 | 80.5 |
| 7. TA10097_29730 | 81.8 | 81.8 | 82.5 | 85.6 | 81.8 | 81.8 | 82.2 | 81.5 | 81.3 | 82.7 | 81.8 | 81.8 |
| 8. TA34363_4513 | 80.0 | 78.1 | 78.3 | 80.3 | 79.1 | 79.1 | 81.0 | 80.5 | 78.3 | 77.1 | 79.1 | 79.3 |
| 9. CR931735_5.4 | 80.3 | 79.6 | 80.3 | 82.5 | 81.0 | 81.0 | 79.6 | 80.3 | 81.3 | 79.6 | 80.3 | 80.8 |
| 10. Os04g45970.1 | 80.8 | 79.4 | 79.6 | 82.3 | 80.3 | 80.3 | 81.6 | 82.5 | 79.6 | 78.4 | 80.8 | 81.3 |
| 11. Os02g0650900 | 79.8 | 77.4 | 77.4 | 80.0 | 77.6 | 77.6 | 77.4 | 78.3 | 77.6 | 77.1 | 77.6 | 78.1 |
| 12. TA199_3690 | 79.6 | 80.3 | 79.8 | 81.8 | 79.1 | 79.1 | 81.0 | 81.0 | 80.8 | 79.1 | 80.5 | 80.8 |
| 13. TA12661_3352 | 78.1 | 76.9 | 78.3 | 79.3 | 76.9 | 76.9 | 79.3 | 78.1 | 77.1 | 77.9 | 78.8 | 79.6 |
| 14. TA7375_113636 | 79.6 | 79.6 | 79.3 | 81.5 | 78.8 | 78.8 | 81.0 | 81.0 | 80.5 | 78.6 | 80.0 | 80.3 |
| 15. Pt575509 | 80.0 | 80.3 | 79.8 | 82.2 | 79.6 | 79.6 | 81.5 | 81.5 | 80.8 | 79.1 | 80.5 | 80.8 |
| 16. Pt828764 | 79.8 | 80.3 | 80.3 | 81.5 | 79.6 | 79.6 | 81.0 | 80.8 | 80.8 | 79.1 | 80.5 | 81.0 |
| 17. Sb5286803 | 80.0 | 78.1 | 79.8 | 80.0 | 78.3 | 78.3 | 82.0 | 81.5 | 79.1 | 78.6 | 80.5 | 79.6 |
| 18. TA48180_4081 | 80.3 | 80.0 | 79.8 | 80.5 | 78.8 | 78.8 | 80.3 | 79.3 | 79.8 | 79.3 | 79.8 | 79.6 |
| 19. TA70276_4565 | 81.0 | 79.3 | 79.3 | 81.3 | 79.6 | 79.6 | 80.8 | 80.3 | 79.6 | 78.1 | 79.8 | 79.3 |
| 20. TA36948_29760 | 79.6 | 78.1 | 80.3 | 80.8 | 78.3 | 78.3 | 81.3 | 80.5 | 80.0 | 80.3 | 79.6 | 80.5 |
| 21. TA160461_4577 | 80.0 | 77.6 | 78.6 | 79.8 | 78.1 | 78.1 | 81.3 | 81.3 | 78.3 | 77.6 | 79.1 | 79.8 |
| 22. TA8521_338618 | 88.1 | 88.3 | 89.5 | 91.0 | 87.3 | 87.3 | 87.6 | 90.0 | 86.9 | 89.1 | 88.8 | 89.8 |
| 23. TA1966_4686 | 84.7 | 85.9 | 87.1 | 87.6 | 85.2 | 85.2 | 88.8 | 87.1 | 86.4 | 85.9 | 84.9 | 86.6 |
| 24. AT3G03910.1 | 92.0 | 85.9 | 89.1 | 89.8 | 85.4 | 85.4 | 84.2 | 88.6 | 85.4 | 88.6 | 86.6 | 87.8 |
| 25. AT5G18170.1 | | 88.3 | 90.5 | 89.8 | 86.9 | 86.9 | 84.7 | 90.0 | 87.8 | 88.1 | 89.8 | 89.8 |
| 26. TA153_347529 | 94.9 | | 90.3 | 90.3 | 93.4 | 93.4 | 84.4 | 89.1 | 88.1 | 87.8 | 88.6 | 88.8 |
| 27. Gm0155x00045.1 | 97.1 | 94.9 | | 90.5 | 88.6 | 88.6 | 84.9 | 89.8 | 89.5 | 92.5 | 92.7 | 89.5 |
| 28. TA9810_29730 | 96.4 | 96.4 | 96.4 | | 90.0 | 90.0 | 86.4 | 91.2 | 88.1 | 92.2 | 89.8 | 89.8 |
| 29. TA8643_4232 | 95.6 | 97.6 | 95.1 | 96.6 | | 100.0 | 85.2 | 90.0 | 87.1 | 85.9 | 87.6 | 88.6 |
| 30. TA1274_73275 | 95.6 | 97.6 | 95.1 | 96.6 | 100.0 | | 85.2 | 90.0 | 87.1 | 85.9 | 87.6 | 88.6 |
| 31. TA35352_4513 | 93.7 | 93.7 | 93.2 | 94.6 | 93.9 | 93.9 | | 86.9 | 83.7 | 83.5 | 83.5 | 87.3 |
| 32. TA11677_35883 | 96.1 | 95.1 | 95.9 | 97.1 | 96.1 | 96.1 | 93.2 | | 88.6 | 88.6 | 90.3 | 93.9 |
| 33. TA3379_3544 | 94.6 | 95.1 | 95.4 | 95.4 | 95.6 | 95.6 | 93.4 | 95.4 | | 88.3 | 89.8 | 88.1 |
| 34. AC174375_7.5 | 96.6 | 95.4 | 97.6 | 98.3 | 95.4 | 95.4 | 93.9 | 96.6 | 95.4 | | 90.8 | 88.3 |
| 35. TA21862_3880 | 95.1 | 94.9 | 96.8 | 95.9 | 94.6 | 94.6 | 92.5 | 95.6 | 95.1 | 96.6 | | 88.6 |
| 36. TA18464_4097 | 96.6 | 95.6 | 95.9 | 97.1 | 96.4 | 96.4 | 94.2 | 97.3 | 95.6 | 96.1 | 94.6 | |
| 37. TA2019_39350 | 95.9 | 95.1 | 95.9 | 95.9 | 95.6 | 95.6 | 92.9 | 96.4 | 95.4 | 95.9 | 94.6 | 95.4 |
| 38. Os03g0794500 | 94.2 | 94.4 | 94.2 | 95.9 | 94.4 | 94.4 | 98.8 | 93.9 | 94.4 | 95.4 | 93.4 | 95.1 |
| 39. TA14146_3330 | 93.9 | 93.7 | 93.9 | 94.6 | 94.2 | 94.2 | 92.7 | 92.9 | 93.4 | 94.6 | 93.4 | 93.9 |
| 40. TA13960_3332 | 93.7 | 93.4 | 93.4 | 94.4 | 93.9 | 93.9 | 92.5 | 92.7 | 92.9 | 94.2 | 93.4 | 93.7 |
| 41. Pt571209 | 96.1 | 95.4 | 96.8 | 98.3 | 95.6 | 95.6 | 94.2 | 96.1 | 94.2 | 97.6 | 96.4 | 96.1 |
| 42. Pt826140 | 96.4 | 94.6 | 95.9 | 97.6 | 94.6 | 94.6 | 93.9 | 94.9 | 93.9 | 96.8 | 95.4 | 95.6 |
| 43. TA35879_4081 | 95.1 | 95.1 | 94.6 | 95.4 | 95.4 | 95.4 | 92.2 | 96.1 | 96.1 | 94.9 | 94.4 | 96.8 |
| 44. TA29537_4113 | 95.4 | 95.4 | 94.9 | 95.6 | 95.6 | 95.6 | 92.5 | 96.1 | 96.4 | 95.1 | 94.6 | 97.1 |
| 45. TA69991_4565 | 93.7 | 93.9 | 93.2 | 94.6 | 93.9 | 93.9 | 100.0 | 93.2 | 93.4 | 93.9 | 92.5 | 94.2 |
| 46. GSVIVT25474001 | 96.8 | 95.6 | 96.4 | 97.6 | 95.9 | 95.9 | 94.9 | 95.1 | 94.9 | 96.8 | 95.1 | 96.4 |
| 47. TA43933_29760 | 96.1 | 94.9 | 95.6 | 96.4 | 95.1 | 95.1 | 94.2 | 94.4 | 94.2 | 96.1 | 94.4 | 95.6 |
| 48. AY106054 | 93.4 | 93.2 | 92.5 | 94.2 | 93.4 | 93.4 | 97.3 | 92.9 | 93.2 | 93.4 | 91.7 | 93.7 |
| 49. TA1057_3197 | 90.8 | 91.7 | 90.0 | 91.2 | 92.2 | 92.2 | 90.8 | 91.0 | 90.8 | 90.5 | 90.8 | 90.5 |
| 50. Pp126976 | 87.1 | 87.6 | 87.1 | 88.3 | 88.6 | 88.6 | 86.6 | 87.3 | 88.3 | 86.9 | 86.6 | 88.3 |
| 51. Sm78170 | 87.8 | 88.1 | 87.8 | 88.3 | 88.6 | 88.6 | 89.1 | 87.8 | 86.9 | 87.6 | 86.6 | 88.6 |
| | 37 | 38 | 39 | 40 | 41 | 42 | 43 | 44 | 45 | 46 | 47 | 48 |
| 1. AT5G07440 | 78.6 | 79.8 | 80.8 | 80.8 | 79.1 | 78.8 | 80.5 | 81.3 | 80.3 | 80.5 | 79.8 | 79.8 |
| 2. AB066298 | 78.6 | 80.0 | 80.3 | 80.3 | 79.3 | 79.3 | 79.8 | 80.5 | 80.0 | 80.3 | 80.0 | 79.6 |
| 3. TA305_347529 | 79.3 | 79.8 | 81.5 | 81.0 | 79.8 | 79.6 | 80.0 | 80.3 | 80.5 | 81.3 | 80.5 | 78.8 |
| 4. TA29927_3635 | 80.3 | 81.3 | 82.0 | 81.8 | 82.0 | 80.5 | 80.8 | 81.0 | 81.8 | 82.2 | 81.5 | 80.0 |
| 5. TA64336_3847 | 79.9 | 80.3 | 83.3 | 83.0 | 80.6 | 80.1 | 80.6 | 81.3 | 81.1 | 81.1 | 80.3 | 79.4 |
| 6. TA10049_29730 | 79.1 | 81.8 | 81.8 | 81.5 | 80.5 | 79.3 | 80.5 | 80.3 | 82.2 | 80.8 | 80.0 | 80.3 |
| 7. TA10097_29730 | 80.8 | 81.8 | 82.7 | 82.5 | 82.5 | 81.0 | 81.3 | 81.5 | 82.2 | 82.7 | 82.0 | 80.5 |
| 8. TA34363_4513 | 78.8 | 80.8 | 81.5 | 81.5 | 79.3 | 79.1 | 79.6 | 79.8 | 81.0 | 79.8 | 78.6 | 79.8 |
| 9. CR931735_5.4 | 78.8 | 79.6 | 81.3 | 81.0 | 80.8 | 80.0 | 79.8 | 80.5 | 79.6 | 80.5 | 79.3 | 78.8 |
| 10. Os04g45970.1 | 79.4 | 81.8 | 83.3 | 83.0 | 80.8 | 80.8 | 80.8 | 80.8 | 81.6 | 81.3 | 80.3 | 80.3 |
| 11. Os02g0650900 | 77.4 | 77.1 | 79.6 | 79.6 | 77.9 | 77.6 | 78.1 | 78.1 | 77.4 | 79.8 | 79.3 | 75.7 |
| 12. TA199_3690 | 80.8 | 80.5 | 82.0 | 81.8 | 80.5 | 80.5 | 80.0 | 80.3 | 81.0 | 81.5 | 80.8 | 79.6 |
| 13. TA12661_3352 | 76.6 | 80.3 | 79.8 | 79.8 | 78.3 | 77.4 | 79.1 | 78.8 | 79.1 | 79.3 | 78.3 | 78.8 |
| 14. TA7375_113636 | 80.3 | 80.0 | 81.3 | 81.0 | 80.5 | 80.0 | 79.8 | 80.0 | 81.0 | 81.5 | 80.8 | 79.1 |
| 15. Pt575509 | 80.8 | 80.5 | 82.0 | 81.8 | 81.0 | 80.5 | 80.5 | 80.8 | 81.5 | 82.0 | 81.3 | 79.6 |
| 16. Pt828764 | 80.3 | 80.3 | 82.5 | 82.2 | 80.5 | 80.0 | 80.5 | 80.8 | 81.0 | 82.0 | 80.8 | 79.1 |
| 17. Sb5286803 | 79.3 | 81.0 | 82.0 | 82.0 | 80.0 | 80.3 | 79.6 | 80.0 | 82.0 | 80.5 | 79.3 | 79.6 |
| 18. TA48180_4081 | 79.1 | 79.6 | 81.8 | 81.5 | 79.8 | 79.6 | 79.8 | 80.0 | 80.5 | 81.5 | 80.3 | 78.3 |
| 19. TA70276_4565 | 78.8 | 80.8 | 81.8 | 81.8 | 79.8 | 79.6 | 79.8 | 80.0 | 80.8 | 80.8 | 79.6 | 79.3 |
| 20. TA36948_29760 | 78.8 | 81.5 | 79.3 | 79.1 | 79.6 | 79.6 | 78.8 | 79.1 | 81.3 | 80.8 | 79.6 | 80.3 |
| 21. TA160461_4577 | 79.1 | 79.8 | 81.0 | 81.0 | 79.6 | 79.6 | 79.1 | 79.6 | 81.0 | 79.8 | 78.6 | 79.1 |
| 22. TA8521_338618 | 88.8 | 89.3 | 86.6 | 86.4 | 90.8 | 90.0 | 88.6 | 88.6 | 87.8 | 92.2 | 90.5 | 86.4 |
| 23. TA1966_4686 | 85.2 | 90.0 | 86.4 | 85.9 | 86.6 | 86.6 | 86.1 | 86.1 | 89.1 | 88.1 | 87.3 | 87.6 |
| 24. AT3G03910.1 | 87.6 | 84.9 | 83.2 | 83.0 | 88.6 | 88.6 | 86.6 | 87.1 | 84.2 | 89.1 | 88.1 | 82.5 |
| 25. AT5G18170.1 | 89.8 | 85.6 | 86.1 | 86.1 | 91.2 | 90.5 | 89.8 | 90.8 | 84.7 | 91.2 | 90.0 | 83.7 |
| 26. TA153_347529 | 89.1 | 86.1 | 85.6 | 85.4 | 89.5 | 89.3 | 89.8 | 89.8 | 84.4 | 90.3 | 89.1 | 83.5 |
| 27. Gm0155x00045.1 | 88.8 | 87.1 | 86.1 | 85.9 | 90.8 | 90.3 | 89.1 | 89.1 | 85.2 | 92.0 | 90.8 | 83.9 |
| 28. TA9810_29730 | 89.8 | 87.8 | 86.4 | 85.9 | 93.7 | 91.7 | 89.8 | 90.3 | 86.6 | 92.7 | 91.5 | 85.4 |
| 29. TA8643_4232 | 87.3 | 85.9 | 84.4 | 84.4 | 88.8 | 88.6 | 88.6 | 89.1 | 85.2 | 89.3 | 88.6 | 84.7 |
| 30. TA1274_73275 | 87.3 | 85.9 | 84.4 | 84.4 | 88.8 | 88.6 | 88.6 | 89.1 | 85.2 | 89.3 | 88.6 | 84.7 |
| 31. TA35352_4513 | 85.9 | 96.8 | 84.4 | 84.2 | 85.6 | 85.6 | 87.1 | 87.1 | 99.8 | 87.1 | 86.4 | 93.9 |
| 32. TA11677_35883 | 92.2 | 87.3 | 85.6 | 85.6 | 91.7 | 91.2 | 92.2 | 92.2 | 86.9 | 91.7 | 90.5 | 85.4 |
| 33. TA3379_3544 | 88.1 | 85.2 | 84.2 | 83.9 | 86.9 | 86.9 | 88.3 | 89.3 | 83.7 | 88.8 | 87.6 | 82.2 |
| 34. AC174375_7.5 | 87.6 | 85.4 | 84.9 | 84.7 | 89.1 | 88.3 | 86.9 | 87.3 | 83.7 | 90.3 | 89.3 | 82.2 |
| 35. TA21862_3880 | 88.6 | 85.2 | 86.1 | 86.4 | 90.5 | 90.3 | 88.3 | 88.8 | 83.7 | 90.5 | 89.3 | 83.0 |
| 36. TA18464_4097 | 90.8 | 88.3 | 85.6 | 85.6 | 90.5 | 90.5 | 93.9 | 93.9 | 87.3 | 92.2 | 91.0 | 86.6 |
| 37. TA2019_39350 | | 87.1 | 85.9 | 85.4 | 89.5 | 89.5 | 89.8 | 90.3 | 85.9 | 91.2 | 90.0 | 84.9 |
| 38. Os03g0794500 | 93.9 | | 84.9 | 84.7 | 87.1 | 87.1 | 88.3 | 88.3 | 97.1 | 89.1 | 88.3 | 95.1 |
| 39. TA14146_3330 | 92.7 | 93.7 | | 99.5 | 85.6 | 85.4 | 85.2 | 85.2 | 84.7 | 86.6 | 86.1 | 82.2 |
| 40. TA13960_3332 | 92.5 | 93.2 | 99.8 | | 85.6 | 85.6 | 85.4 | 85.4 | 84.4 | 86.9 | 86.4 | 82.5 |
| 41. Pt571209 | 95.1 | 95.4 | 94.2 | 94.4 | | 95.4 | 90.0 | 90.5 | 85.9 | 93.7 | 92.0 | 85.2 |
| 42. Pt826140 | 94.2 | 96.1 | 93.9 | 93.9 | 98.8 | | 88.6 | 89.1 | 85.6 | 93.2 | 91.5 | 85.4 |
| 43. TA35879_4081 | 94.2 | 93.2 | 92.2 | 92.5 | 95.1 | 94.6 | | 98.8 | 87.1 | 91.2 | 90.5 | 86.1 |
| 44. TA29537_4113 | 94.4 | 93.4 | 92.5 | 92.7 | 95.4 | 94.9 | 99.8 | | 87.1 | 91.7 | 90.8 | 85.9 |
| 45. TA69991_4565 | 92.9 | 98.8 | 92.7 | 92.5 | 94.2 | 94.2 | 92.2 | 92.5 | | 87.3 | 86.6 | 93.9 |
| 46. GSVIVT25474001 | 94.9 | 96.1 | 94.4 | 94.4 | 98.3 | 97.8 | 95.6 | 95.9 | 94.9 | | 98.3 | 86.6 |
| 47. TA43933_29760 | 94.2 | 95.4 | 93.7 | 93.7 | 97.1 | 96.6 | 94.9 | 95.1 | 94.2 | 98.8 | | 85.9 |
| 48. AY106054 | 92.9 | 97.6 | 92.5 | 92.2 | 93.7 | 93.9 | 91.7 | 92.2 | 97.3 | 93.9 | 93.2 | |
| 49. TA1057_3197 | 91.0 | 91.2 | 91.5 | 91.2 | 90.8 | 91.0 | 90.0 | 90.3 | 90.8 | 90.3 | 89.5 | 90.3 |
| 50. Pp126976 | 86.9 | 87.1 | 88.3 | 87.8 | 87.8 | 87.3 | 87.8 | 88.1 | 86.9 | 87.3 | 86.4 | 86.1 |
| 51. Sm78170 | 86.4 | 88.8 | 89.5 | 89.3 | 89.1 | 88.8 | 87.1 | 87.1 | 89.1 | 88.3 | 87.3 | 88.6 |

| | 49 | 50 | 51 |
|---|---|---|---|
| 1. AT5G07440 | 77.6 | 76.4 | 74.5 |
| 2. AB066298 | 78.6 | 76.2 | 75.2 |
| 3. TA305_347529 | 75.2 | 76.2 | 74.0 |
| 4. TA29927_3635 | 77.4 | 76.6 | 74.5 |
| 5. TA64336_3847 | 77.4 | 75.0 | 74.8 |
| 6. TA10049_29730 | 77.1 | 74.7 | 74.5 |
| 7. TA10097_29730 | 78.1 | 77.1 | 74.9 |
| 8. TA34363_4513 | 75.2 | 73.2 | 72.7 |
| 9. CR931735_5.4 | 76.2 | 73.2 | 74.7 |
| 10. Os04g45970.1 | 76.9 | 74.0 | 73.8 |
| 11. Os02g0650900 | 74.7 | 73.2 | 72.0 |
| 12. TA199_3690 | 80.0 | 76.2 | 74.5 |
| 13. TA12661_3352 | 74.7 | 71.5 | 70.8 |
| 14. TA7375_113636 | 79.3 | 75.9 | 74.0 |
| 15. Pt575509 | 80.0 | 76.6 | 74.5 |
| 16. Pt828764 | 79.1 | 76.4 | 74.2 |
| 17. Sb5286803 | 75.4 | 74.2 | 72.7 |
| 18. TA48180_4081 | 77.6 | 74.0 | 74.0 |
| 19. TA70276_4565 | 75.9 | 73.0 | 72.5 |
| 20. TA36948_29760 | 77.4 | 74.9 | 74.0 |
| 21. TA160461_4577 | 75.4 | 73.0 | 71.5 |
| 22. TA8521_338618 | 77.4 | 75.7 | 76.4 |
| 23. TA1966_4686 | 76.4 | 75.4 | 76.9 |
| 24. AT3G03910.1 | 76.2 | 74.7 | 72.7 |
| 25. AT5G18170.1 | 78.3 | 75.7 | 75.9 |
| 26. TA153_347529 | 80.0 | 75.7 | 76.6 |
| 27. Gm0155x00045.1 | 77.9 | 75.2 | 76.4 |
| 28. TA9810_29730 | 78.3 | 76.2 | 77.1 |
| 29. TA8643_4232 | 79.3 | 76.2 | 76.2 |
| 30. TA1274_73275 | 79.3 | 76.2 | 76.2 |
| 31. TA35352_4513 | 78.1 | 75.4 | 77.1 |
| 32. TA11677_35883 | 79.6 | 76.9 | 76.4 |
| 33. TA3379_3544 | 78.1 | 75.9 | 75.9 |
| 34. AC174375_7.5 | 76.9 | 74.9 | 74.9 |
| 35. TA21862_3880 | 80.0 | 76.2 | 75.9 |
| 36. TA18464_4097 | 78.6 | 76.6 | 76.9 |
| 37. TA2019_39350 | 79.8 | 75.9 | 76.4 |
| 38. Os03g0794500 | 78.1 | 74.5 | 77.4 |
| 39. TA14146_3330 | 78.3 | 77.4 | 77.6 |
| 40. TA13960_3332 | 78.3 | 77.4 | 77.6 |
| 41. Pt571209 | 78.6 | 75.2 | 77.4 |
| 42. Pt826140 | 78.8 | 76.2 | 78.1 |
| 43. TA35879_4081 | 77.9 | 76.9 | 76.4 |
| 44. TA29537_4113 | 78.3 | 76.9 | 76.9 |
| 45. TA69991_4565 | 78.1 | 75.4 | 77.1 |
| 46. GSVIVT25474001 | 79.1 | 76.6 | 77.6 |
| 47. TA43933_29760 | 77.9 | 76.6 | 77.1 |
| 48. AY106054 | 77.1 | 73.5 | 76.2 |
| 49. TA1057_3197 | | 78.3 | 76.6 |
| 50. Pp126976 | 91.0 | | 74.0 |
| 51. Sm78170 | 89.1 | 87.3 | |

[0704] The percentage identity between SEQ ID NO: 2 (AY106054 on line 48) and other GDH polypeptide sequences within the subgroups of Class I and mosses does not fall below 73%, whereas the percentage identity between SEQ ID NO: 110 (Os02g0650900 on line 11) and other GDH polypeptide sequences within the subgroups of Class I and mosses does not fall below 72%, which illustrates the high sequence conservation. Minimal identity among the sequences within alpha subunit subgroup of GDH proteins is 75%. Minimal identity within beta subunit subgroup of GDH is 82%. Identity between alpha and beta subunit subgroups ranges between 75-85%. Most of the alpha and beta subunit sequences have 80% or more identity with AY106054 and Os02g0650900. Minimal identity within class II GDH proteins is 26%.

### 2. Small Auxin-Up RNA (SAUR) Polypeptides

[0705] Parameters used in the comparison were:
[0706] Scoring matrix: Blosum62,
[0707] First Gap: 12,
[0708] Extending Gap: 2.

[0709] Results of the software analysis are shown in Table B2 for the global similarity and identity over the full length of the polypeptide sequences. The sequence identity (in %) between a selection of SAUR polypeptide sequences from Table A3. A SAUR polypeptide useful in performing the methods of the invention is generally higher than 22.8% compared to SEQ ID NO: 502 (A. thaliana_AT2G21210).

TABLE B2
MatGAT results for global similarity and identity over the full length of the
polypeptide sequences.

| | 1. | 2. | 77. | 111. | 112. | 113. | 114. | 128. |
|---|---|---|---|---|---|---|---|---|
| 1. O.sativa_OsSAUR1 | | 31.7 | 23.9 | 26 | 22.8 | 26.5 | 24.8 | 23.4 |
| 2. O.sativa_OsSAUR2 | 38.5 | | 30.1 | 22.8 | 25.8 | 23.6 | 24.8 | 22.1 |
| 77. A.thaliana_AT2G21210 | 44.9 | 41.8 | | 49 | 68.9 | 49.5 | 43.6 | 39.4 |
| 112. A.thaliana_AT4G38840 | 42.4 | 41 | 82.8 | 69.7 | | 53.5 | 46.2 | 41.9 |
| 113. A.thaliana_AT4G38850 | 47.3 | 35.2 | 68.4 | 77.5 | 68.7 | | 43.5 | 39.8 |
| 114. A.thaliana_AT4G38860 | 40 | 41.8 | 65.7 | 52.4 | 62.9 | 58.1 | | 57.5 |
| 128. A.thaliana_AT5G66260 | 38.4 | 36.9 | 57.6 | 55.6 | 56.6 | 55.6 | 67.6 | |

### 3. SAUR Polypeptides, or SYNP Polypeptides, or Fusion Proteins of SAUR Polypeptides and SYNP Polypeptides

[0710] Results of the software analysis are shown in Table B3 for the global similarity and identity over the full length of the polypeptide sequences. The sequence identity (in %) between a selection of SAUR polypeptide sequences from Table A4. A SAUR polypeptide useful in performing the methods of the invention is generally higher than 22.8% compared to SEQ ID NO: 1164 (A. thaliana_AT2G21210).

TABLE B3
MatGAT results for global similarity and identity over the full length of the
polypeptide sequences.

| | 1. | 2. | 77. | 111. | 112. | 113. | 114. | 128. |
|---|---|---|---|---|---|---|---|---|
| 1. O.sativa_OsSAUR1 | | 31.7 | 23.9 | 26 | 22.8 | 26.5 | 24.8 | 23.4 |
| 2. O.sativa_OsSAUR2 | 38.5 | | 30.1 | 22.8 | 25.8 | 23.6 | 24.8 | 22.1 |
| 77. A.thaliana_AT2G21210 | 44.9 | 41.8 | | 49 | 68.9 | 49.5 | 43.6 | 39.4 |
| 112. A.thaliana_AT4G38840 | 42.4 | 41 | 82.8 | 69.7 | | 53.5 | 46.2 | 41.9 |
| 113. A.thaliana_AT4G38850 | 47.3 | 35.2 | 68.4 | 77.5 | 68.7 | | 43.5 | 39.8 |
| 114. A.thaliana_AT4G38860 | 40 | 41.8 | 65.7 | 52.4 | 62.9 | 58.1 | | 57.5 |
| 128. A.thaliana_AT5G66260 | 38.4 | 36.9 | 57.6 | 55.6 | 56.6 | 55.6 | 67.6 | |

### 4. Dehydroascorbate Reductase (DHAR) Polypeptides

[0711] Parameters used in the comparison were:
[0712] Scoring matrix: Blosum62
[0713] First Gap: 12
[0714] Extending gap: 2

[0715] Results of the software analysis are shown in Table B4 for the global and identity over the full length of the polypeptide sequences.

[0716] The percentage identity between the DHAR polypeptide sequences useful in performing the methods of the invention can be as low as 49% amino acid identity compared to SEQ ID NO: 1958.

TABLE B4
MatGAT results for global similarity and identity over the full length of the
polypeptide sequences.

| Name | 101 | 102 | 103 | 104 | 105 | 106 | 107 | 108 | 109 | 110 |
|---|---|---|---|---|---|---|---|---|---|---|
| 101. S.aethnensis_TA30_121540 | | 52.6 | 70.4 | 78.5 | 75.2 | 74.8 | 66.7 | 69.8 | 75.7 | 83.7 |
| 102. S.bicolor_Sb09g001690.1 | | | 64 | 55.4 | 55.8 | 55.4 | 62.2 | 65.2 | 55.1 | 51.3 |
| 103. S.bicolor_Sb09g001700.1 | | | | 74.3 | 69.6 | 69.2 | 95.8 | 82.7 | 71 | 69.8 |
| 104. S.indicum_DQ287974 | | | | | 78.3 | 78.3 | 70.6 | 72.8 | 79.7 | 78.4 |
| 105. S.lycopersicum_TC196877 | | | | | | 97.6 | 67.5 | 72.3 | 75.9 | 72.3 |
| 106. S.tuberosum_TC167795 | | | | | | | 67 | 71.4 | 75.9 | 72.3 |
| 107. T.aestivum_CA484858 | | | | | | | | 79 | 67.3 | 66 |
| 108. T.aestivum_TC278165 | | | | | | | | | 73.2 | 67.8 |
| 109. T.hispida_TA863_189793 | | | | | | | | | | 76.1 |
| 110. T.kok-saghyz_TA971_333970 | | | | | | | | | | |

### Example 4

### Identification of Domains Comprised in Polypeptide Sequences Useful in Performing the Methods of the Invention

[0717] The Integrated Resource of Protein Families, Domains and Sites (InterPro) database is an integrated interface for the commonly used signature databases for text- and sequence-based searches. The InterPro database combines these databases, which use different methodologies and varying degrees of biological information about well-characterized proteins to derive protein signatures. Collaborating databases include SWISS-PROT, PROSITE, TrEMBL, PRINTS, Propom and Pfam, Smart and TIGRFAMs. Pfam is a large collection of multiple sequence alignments and hidden Markov models covering many common protein domains and families. Pfam is hosted at the Sanger Institute server in the United Kingdom. Interpro is hosted at the European Bioinformatics Institute in the United Kingdom.

### 1. Glutamate Dehydrogenase (GDH) Polypeptides

[0718] The results of the InterPro scan of the polypeptide sequence as represented by SEQ ID NO: 2 are presented in Table C1.

TABLE C1
InterPro scan results (major accession numbers) of the polypeptide
sequence as represented by SEQ ID NO: 2.

| | | | Amino acid |
|---|---|---|---|
| | | | coordinates |
| | | | (SEQ ID |
| Database | Accession number | Accession name | NO 2) |
| Interpro | IPR006095 | Glutamate/phenylalanine/leucine/ | |
| | | valine dehydrogenase | |
| PRINTS | PR00082 | GLFDHDRGNASE | [88-102]T |
| | | | [167-189]T |
| | | | [209-229]T |
| | | | [336-347]T |
| PANTHER | PTHR11606:SF2 | GLUTAMATE DEHYDROGENASE | [1-410]T |
| Interpro | IPR006096 | Glutamate/phenylalanine/leucine/valine | |
| | | dehydrogenase, C-terminal | |
| PFAM | PF00208 | ELFV_dehydrog | [176-408]T |
| Interpro | IPR006097 | Glutamate/phenylalanine/leucine/valine | |
| | | dehydrogenase, dimerisation region | |
| PFAM | PF02812 | ELFV_dehydrog_N | [31-161]T |
| Interpro | IPR014362 | Glutamate dehydrogenase | |
| PIR | PIRSF000185 | Glutamate dehydrogenase | [1-411]T |
| Interpro | IPR016040 | NAD(P)-binding | |
| GENE3D | G3DSA:3.40.50.720 | no description | [176-409]T |
| SUPERFAMILY | SSF51735 | NAD(P)-binding Rossmann-fold | [175-409]T |
| | | domains | |
| | noIPR | unintegrated | |
| GENE3D | G3DSA:3.40.192.10 | no description | [33-175]T |
| PANTHER | PTHR11606 | GLUTAMATE DEHYDROGENASE | [1-410]T |
| SUPERFAMILY | SSF53223 | Aminoacid dehydrogenase-like, N- | [1-170]T |
| | | terminal domain | |

### 2. Fasciclin-Like AGP (FLAs) Polypeptides

[0719] The results of the Pfam search of the polypeptide sequence as represented by SEQ ID NO: 172 are presented in Table C2.

TABLE C2
InterPro scan results (major accession numbers) of the polypeptide
sequence as represented by SEQ ID NO: 172.

| | | Accesion | Amino acid coordinates |
|---|---|---|---|
| Database | Accession name | number | on SEQ ID NO 172 |
| Pfam | fasciclin | (PF02469) | 37-64 and 198-327 |

[0720] Alternatively, conserved domains may be found by searching or scanning InterPro database. The Integrated Resource of Protein Families, Domains and Sites (InterPro) database is an integrated interface for the commonly used signature databases for text- and sequence-based searches. The InterPro database combines these databases, which use different methodologies and varying degrees of biological information about well-characterized proteins to derive protein signatures. Collaborating databases include SWISS-PROT, PROSITE, TrEMBL, PRINTS, Propom and Pfam, Smart and TIGRFAMs.

### 3. Small Auxin-Up RNA (SAUR) Polypeptides

[0721] The results of the InterPro scan of the polypeptide sequence as represented by SEQ ID NO: 502 are presented in Table C3.

TABLE C3
InterPro scan results (major accession numbers) of the polypeptide
sequence as represented by SEQ ID NO: 502.

| | | | Amino acid coordinates |
|---|---|---|---|
| Database | Accession number | Accession name | on SEQ ID NO 502 |
| InterPro | IPR003676 | Auxin responsive | |
| | | SAUR protein | |
| PFAM | PF02519 | Auxin_inducible | 1-95 |

[0722] An auxin inducible domain is also referred to as Auxin responsive.

### 4. SAUR Polypeptides, or SYNP Polypeptides, or Fusion Proteins of SAUR Polypeptides and SYNP Polypeptides

[0723] The results of the InterPro scan of the polypeptide sequence as represented by SEQ ID NO: 1164 are presented in Table C4.

TABLE C4
InterPro scan results (major accession numbers) of the polypeptide
sequence as represented by SEQ ID NO: 1164.

| | | | Amino acid coordinates |
|---|---|---|---|
| Database | Accession number | Accession name | on SEQ ID NO 1164 |
| InterPro | IPR003676 | Auxin responsive | |
| | | SAUR protein | |
| PFAM | PF02519 | Auxin_inducible | 1-95 |

[0724] An auxin inducible domain is also referred to as Auxin responsive.

### 5. Dehydroascorbate Reductase (DHAR) Polypeptides

[0725] The results of the InterPro scan of the polypeptide sequence as represented by SEQ ID NO: 1958 are presented in Table C5.

TABLE C5
InterPro scan results (major accession numbers) of the polypeptide
sequence as represented by SEQ ID NO: 1958.

| | | | Amino acid |
|---|---|---|---|
| | | | coordinates on |
| | | | SEQ ID NO: |
| Database | Accession number | Accession name | 1958 |
| ProfileScan | PS50404 | GST_NTER | 10-88 |
| ProfileScan | PS50405 | GST_CTER | 66-210 |
| Gene3D | G3DSA:3.40.30.10 | no description | 20-90 |
| Gene3D | G3DSA:1.20.1050.10 | no description | 90-210 |
| HMMPanther | PTHR11260:SF15 | DEHYDROASCORBATE | 19-210 |
| | | REDUCTASE | |
| HMMPanther | PTHR11260 | GLUTATHIONE S-TRANSFERASE, | 19-210 |
| | | GST, SUPERFAMILY, | |
| | | GST DOMAIN CONTAINING | |
| HMMPfam | PF02798 | GST_N | 20-82 |
| superfamily | SSF47616 | Glutathione S-transferase | 83-209 |
| | | (GST), C-terminal domain | |
| superfamily | SSF52833 | Thioredoxin-like | 20-79 |

### Example 5

### Topology Prediction of the Polypeptide Sequences Useful in Performing the Methods of the Invention

### 1. Glutamate Dehydrogenase (GDH) Polypeptides

[0726] TargetP 1.1 predicts the subcellular location of eukaryotic proteins. The location assignment is based on the predicted presence of any of the N-terminal pre-sequences: chloroplast transit peptide (cTP), mitochondrial targeting peptide (mTP) or secretory pathway signal peptide (SP). Scores on which the final prediction is based are not really probabilities, and they do not necessarily add to one. However, the location with the highest score is the most likely according to TargetP, and the relationship between the scores (the reliability class) may be an indication of how certain the prediction is. The reliability class (RC) ranges from 1 to 5, where 1 indicates the strongest prediction. TargetP is maintained at the server of the Technical University of Denmark.

[0727] For the sequences predicted to contain an N-terminal presequence a potential cleavage site can also be predicted.

[0728] A number of parameters were selected, such as organism group (non-plant or plant), cutoff sets (none, predefined set of cutoffs, or user-specified set of cutoffs), and the calculation of prediction of cleavage sites (yes or no).

[0729] The results of TargetP 1.1 analysis of the polypeptide sequence as represented by SEQ ID NO: 2 are presented Table D1. The “plant” organism group has been selected, no cutoffs defined, and the predicted length of the transit peptide requested. No particular subcellular localization of the polypeptide sequence was predicted.

TABLE D1
TargetP 1.1 analysis of the polypeptide sequence as represented by
SEQ ID NO: 2.

| Name | Len | cTP | mTP | SP | other | Loc | RC | TPlen |
|---|---|---|---|---|---|---|---|---|
| SEQ ID NO: 2 | 411 | 0.086 | 0.295 | 0.203 | 0.378 | — | 5 | — |
| cutoff | | 0.000 | 0.000 | 0.000 | 0.000 | | | |

Abbreviations:
Len, Length;
cTP, Chloroplastic transit peptide;
mTP, Mitochondrial transit peptide,
SP, Secretory pathway signal peptide,
other, Other subcellular targeting,
Loc, Predicted Location;
RC, Reliability class;
TPlen, Predicted transit peptide length.

[0730] When using other algorithms, a mitochondrial location is predicted (e.g. psort: mitochondrial: 0.508, cytoplasm 0.450; MitoP2: 0.6568), which is in agreement with the literature data.

[0731] Many other algorithms can be used to perform such analyses, including:
[0732] ChloroP 1.1 hosted on the server of the Technical University of Denmark;
[0733] Protein Prowler Subcellular Localisation Predictor version 1.2 hosted on the server of the Institute for Molecular Bioscience, University of Queensland, Brisbane, Australia;
[0734] PENCE Proteome Analyst PA-GOSUB 2.5 hosted on the server of the University of Alberta, Edmonton, Alberta, Canada;
[0735] TMHMM, hosted on the server of the Technical University of Denmark
[0736] PSORT (URL: psort.org)
[0737] PLOC (Park and Kanehisa, Bioinformatics, 19, 1656-1663, 2003).

### 2. Fasciclin-Like AGP (FLAB) Polypeptides

[0738] TargetP 1.1 predicts the subcellular location of eukaryotic proteins. The location assignment is based on the predicted presence of any of the N-terminal pre-sequences: chloroplast transit peptide (cTP), mitochondrial targeting peptide (mTP) or secretory pathway signal peptide (SP). Scores on which the final prediction is based are not really probabilities, and they do not necessarily add to one. However, the location with the highest score is the most likely according to TargetP, and the relationship between the scores (the reliability class) may be an indication of how certain the prediction is. The reliability class (RC) ranges from 1 to 5, where 1 indicates the strongest prediction. TargetP is maintained at the server of the Technical University of Denmark.

[0739] FLA-like polypeptides are typically found anchored at a membrane, more typically the plasmatic membrane.

### 3. Small Auxin-Up RNA (SAUR) Polypeptides

[0740] TargetP 1.1 predicts the subcellular location of eukaryotic proteins. The location assignment is based on the predicted presence of any of the N-terminal pre-sequences: chloroplast transit peptide (cTP), mitochondrial targeting peptide (mTP) or secretory pathway signal peptide (SP). Scores on which the final prediction is based are not really probabilities, and they do not necessarily add to one. However, the location with the highest score is the most likely according to TargetP, and the relationship between the scores (the reliability class) may be an indication of how certain the prediction is. The reliability class (RC) ranges from 1 to 5, where 1 indicates the strongest prediction. TargetP is maintained at the server of the Technical University of Denmark.

[0741] For the sequences predicted to contain an N-terminal presequence a potential cleavage site can also be predicted.

[0742] Alternatively, many other algorithms can be used to perform such analyses, including:
[0743] ChloroP 1.1 hosted on the server of the Technical University of Denmark;
[0744] Protein Prowler Subcellular Localisation Predictor version 1.2 hosted on the server of the Institute for Molecular Bioscience, University of Queensland, Brisbane, Australia;
[0745] PENCE Proteome Analyst PA-GOSUB 2.5 hosted on the server of the University of Alberta, Edmonton, Alberta, Canada;
[0746] TMHMM, hosted on the server of the Technical University of Denmark
[0747] PSORT (URL: psort.org)
[0748] PLOC (Park and Kanehisa, Bioinformatics, 19, 1656-1663, 2003).

### 4. SAUR Polypeptides, or SYNP Polypeptides, or Fusion Proteins of SAUR Polypeptides and SYNP Polypeptides

[0749] TargetP 1.1 predicts the subcellular location of eukaryotic proteins. The location assignment is based on the predicted presence of any of the N-terminal pre-sequences: chloroplast transit peptide (cTP), mitochondrial targeting peptide (mTP) or secretory pathway signal peptide (SP). Scores on which the final prediction is based are not really probabilities, and they do not necessarily add to one. However, the location with the highest score is the most likely according to TargetP, and the relationship between the scores (the reliability class) may be an indication of how certain the prediction is. The reliability class (RC) ranges from 1 to 5, where 1 indicates the strongest prediction. TargetP is maintained at the server of the Technical University of Denmark.

[0750] For the sequences predicted to contain an N-terminal presequence a potential cleavage site can also be predicted.

[0751] Alternatively, many other algorithms can be used to perform such analyses, including:
[0752] ChloroP 1.1 hosted on the server of the Technical University of Denmark;
[0753] Protein Prowler Subcellular Localisation Predictor version 1.2 hosted on the server of the Institute for Molecular Bioscience, University of Queensland, Brisbane, Australia;
[0754] PENCE Proteome Analyst PA-GOSUB 2.5 hosted on the server of the University of Alberta, Edmonton, Alberta, Canada;
[0755] TMHMM, hosted on the server of the Technical University of Denmark
[0756] PSORT (URL: psort.org)
[0757] PLOC (Park and Kanehisa, Bioinformatics, 19, 1656-1663, 2003).

### 5. Dehydroascorbate Reductase (DHAR) Polypeptides

[0758] TargetP 1.1 predicts the subcellular location of eukaryotic proteins. The location assignment is based on the predicted presence of any of the N-terminal pre-sequences: chloroplast transit peptide (cTP), mitochondrial targeting peptide (mTP) or secretory pathway signal peptide (SP). Scores on which the final prediction is based are not really probabilities, and they do not necessarily add to one. However, the location with the highest score is the most likely according to TargetP, and the relationship between the scores (the reliability class) may be an indication of how certain the prediction is. The reliability class (RC) ranges from 1 to 5, where 1 indicates the strongest prediction. TargetP is maintained at the server of the Technical University of Denmark.

[0759] For the sequences predicted to contain an N-terminal presequence a potential cleavage site can also be predicted.

[0760] Many other algorithms can be used to perform such analyses, including:
[0761] ChloroP 1.1 hosted on the server of the Technical University of Denmark;
[0762] Protein Prowler Subcellular Localisation Predictor version 1.2 hosted on the server of the Institute for Molecular Bioscience, University of Queensland, Brisbane, Australia;
[0763] PENCE Proteome Analyst PA-GOSUB 2.5 hosted on the server of the University of Alberta, Edmonton, Alberta, Canada;
[0764] TMHMM, hosted on the server of the Technical University of Denmark
[0765] PSORT (URL: psort.org)
[0766] PLOC (Park and Kanehisa, Bioinformatics, 19, 1656-1663, 2003).

### Example 6

### Assay Related to the Polypeptide Sequences Useful in Performing the Methods of the Invention

### 1. Glutamate Dehydrogenase (GDH) Polypeptides

[0767] Tissues are ground under liquid N₂, extracted in five volumes of GDH extraction buffer (100 mM Tris [pH 8.0], 2 mM EDTA, 5% insoluble PVPP, 5% soluble PVP-40, 1 mM DTT, 1 mM reduced glutathione, 0.1% v/v Triton X-100), and the extracts are clarified by centrifugation (13,000 g, 15 min, 4° C.).

[0768] GDH activity may be determined in both aminating and deaminating directions. The standard amination reaction mixture contains 100 mM Tris-HCl, pH 8.0, 20 mM α-ketoglutarate, 200 mM NH₄Cl, 1 mM CaCl₂, 0.2 mM NAD(P)H, enzyme solution, and deionized water to a final volume of 1 cm³. The standard deamination reaction mixture contains 100 mM Tris-HCl, pH 9.3, 100 mM L-Glu, 1 mM NAD(P)⁺, 0.5 mM CaCl₂, enzyme solution, and deionized water to a final volume of 1 cm³. All assays are performed at 30° C. The absorption change at 340 nm is measured using a Perkin-Elmer UV/VIS spectrophotometer. One unit of GDH activity is defined as the reduction or oxidation of 1 mmol of coenzyme [NAD(P)⁺, NAD(P)H, respectively] min⁻¹ at 30° C.

### 2. Fasciclin-Like AGP (FLAs) Polypeptides

[0769] The N-glycosylation activity of FLA-like polypeptides may be detected as described by Johnson et al., Plant Physiol. (2003) 133 (4) 1911-1925.

### 3. Dehydroascorbate Reductase (DHAR) Polypeptides

[0770] The functional assay for the DAHR polypeptide is described in: Kato, Y. (1997)—Plant Cell Physiol. 38(2): 173-178.

### Example 7

### Cloning of the Nucleic Acid Sequence Used in the Methods of the Invention

### 1. Glutamate Dehydrogenase (GDH) Polypeptides

[0771] a) cloning of Zm_GDH (SEQ ID NO: 1/2)

[0772] The nucleic acid sequence used in the methods of the invention was amplified by PCR using as template a custom-made Zea mays seedlings cDNA library (in pCMV Sport 6.0; Invitrogen, Paisley, UK). PCR was performed using Hifi Taq DNA polymerase in standard conditions, using 200 ng of template in a 50 μl PCR mix. The primers used were prm7065 (SEQ ID NO: 27; sense, start codon in bold): 5′-ggggacaagtttgtacaaaaaagcaggcttaaa caatgaatgcattggcagca-3′ and prm7066 (SEQ ID NO: 28; reverse, complementary): 5′-ggggaccactttgta caagaaagctgggtggaggtcatgcttcccatc-3′, which include the AttB sites for Gateway recombination. The amplified PCR fragment was purified also using standard methods. The first step of the Gateway procedure, the BP reaction, was then performed, during which the PCR fragment recombined in vivo with the pDONR201 plasmid to produce, according to the Gateway terminology, an “entry clone”, pZmGDH. Plasmid pDONR201 was purchased from Invitrogen, as part of the Gateway® technology.

[0773] The entry clone comprising SEQ ID NO: 1 was then used in an LR reaction with a destination vector used for Oryza sativa transformation. This vector contained as functional elements within the T-DNA borders: a plant selectable marker; a screenable marker expression cassette; and a Gateway cassette intended for LR in vivo recombination with the nucleic acid sequence of interest already cloned in the entry clone. A rice GOS2 promoter (SEQ ID NO: 23) for constitutive specific expression (or a rice RCc3 promoter (SEQ ID NO: 24) for root specific expression) was located upstream of this Gateway cassette.

[0774] After the LR recombination step, the resulting expression vector pGOS2::ZmGDH (FIG. 4) or the pRCc3::ZmGDH was transformed into Agrobacterium strain LBA4044 according to methods well known in the art.

b) cloning of Os_GDH (SEQ ID NO: 39/116)

[0775] The nucleic acid sequence used in the methods of the invention was amplified by PCR using as template a custom-made Oryza sativa seedlings cDNA library (in pCMV Sport 6.0; Invitrogen, Paisley, UK). PCR was performed using Hifi Taq DNA polymerase in standard conditions, using 200 ng of template in a 50 μl PCR mix. The primers used were prm7063 (SEQ ID NO: 25; sense, start codon in bold): 5′-ggggacaagtttgtacaaaaaagc aggcttaaacaatgaacgcgctagccg-3′ and prm7064 (SEQ ID NO: 26; reverse, complementary): 5′-ggggaccactttgtacaagaaagctgggtcctcaacagattctcatgcc t-3′, which include the AttB sites for Gateway recombination. The amplified PCR fragment was purified also using standard methods. The first step of the Gateway procedure, the BP reaction, was then performed, during which the PCR fragment recombined in vivo with the pDONR201 plasmid to produce, according to the Gateway terminology, an “entry clone”, pOsGDH. Plasmid pDONR201 was purchased from Invitrogen, as part of the Gateway® technology.

[0776] The entry clone comprising SEQ ID NO: 39 was then used in an LR reaction with a destination vector used for Oryza sativa transformation. This vector contained as functional elements within the T-DNA borders: a plant selectable marker; a screenable marker expression cassette; and a Gateway cassette intended for LR in vivo recombination with the nucleic acid sequence of interest already cloned in the entry clone. A rice GOS2 promoter (SEQ ID NO: 23) for constitutive specific expression (or a rice RCc3 promoter (SEQ ID NO: 24) for root specific expression) was located upstream of this Gateway cassette.

[0777] After the LR recombination step, the resulting expression vector pGOS2::OsGDH or the pRCc3::OsGDH was transformed into Agrobacterium strain LBA4044 according to methods well known in the art.

### 2. Fasciclin-Like AGP (FLAB) Polypeptides

[0778] The nucleic acid sequence was amplified by PCR using as template a custom-made Lycopersicum esculentum seedlings cDNA library (in pCMV Sport 6.0; Invitrogen, Paisley, UK). PCR was performed using Hifi Taq DNA polymerase in standard conditions, using 200 ng of template in a 50 μl PCR mix. The primers used were as in SEQ ID NO: 498; sense): 5′-ggggacaagtttgtacaaaaaagcaggcttaaacaatgcagcttccgtcgtc-3′ and as in SEQ ID NO: 499; reverse, complementary: 5′-ggggaccactttgtacaagaaagctgggtttctttttcaaacttccatcaa-3′, which include the AttB sites for Gateway recombination. The amplified PCR fragment was purified also using standard methods. The first step of the Gateway procedure, the BP reaction, was then performed, during which the PCR fragment recombined in vivo with the pDONR201 plasmid to produce, according to the Gateway terminology, an “entry clone”, pFLA-like. Plasmid pDONR201 was purchased from Invitrogen, as part of the Gateway® technology.

[0779] The entry clone comprising SEQ ID NO: 171 was then used in an LR reaction with a destination vector used for Oryza sativa transformation. This vector contained as functional elements within the T-DNA borders: a plant selectable marker; a screenable marker expression cassette; and a Gateway cassette intended for LR in vivo recombination with the nucleic acid sequence of interest already cloned in the entry clone. A rice GOS2 promoter (SEQ ID NO: 500) for constitutive specific expression was located upstream of this Gateway cassette.

[0780] After the LR recombination step, the resulting expression vector pGOS2::FLA-like polypeptide was transformed into Agrobacterium strain LBA4044 according to methods well known in the art.

### 3. Small Auxin-Up RNA (SAUR) Polypeptides

[0781] The nucleic acid sequence was amplified by PCR using as template a custom-made Arabidopsis thaliana seedlings cDNA library (in pCMV Sport 6.0; Invitrogen, Paisley, UK). PCR was performed using Hifi Taq DNA polymerase in standard conditions, using 200 ng of template in a 50 μl PCR mix. The primers used were a represented by SEQ ID NO: 1161 and 1162; which include the AttB sites for Gateway recombination. The amplified PCR fragment was purified also using standard methods. The first step of the Gateway procedure, the BP reaction, was then performed, during which the PCR fragment recombined in vivo with the pDONR201 plasmid to produce, according to the Gateway terminology, an “entry clone”, pSAUR. Plasmid pDONR201 was purchased from Invitrogen, as part of the Gateway® technology.

[0782] The entry clone comprising the coding region of SEQ ID NO: 501 was then used in an LR reaction with a destination vector used for Oryza sativa transformation. This vector contained as functional elements within the T-DNA borders: a plant selectable marker; a screenable marker expression cassette; and a Gateway cassette intended for LR in vivo recombination with the nucleic acid sequence of interest already cloned in the entry clone. A leaf-specific promoter (SEQ ID NO: 1163) for leaf-specific expression was located upstream of this Gateway cassette.

[0783] After the LR recombination step, the resulting expression vector ppCpR::SAUR was transformed into Agrobacterium strain LBA4044 according to methods well known in the art.

[0784] The above identical procedure was carried out for SAUR-33 represented by SEQ ID NO: 2210 under the control of an gos2 promoter as represented by SEQ ID NO: 2288.

### 4. SAUR Polypeptides, or SYNP Polypeptides, or Fusion Proteins of SAUR Polypeptides and SYNP Polypeptides

[0785] The nucleic acid sequence was amplified by PCR using as template a custom-made Arabidopsis thaliana seedlings cDNA library (in pCMV Sport 6.0; Invitrogen, Paisley, UK). PCR was performed using Hifi Taq DNA polymerase in standard conditions, using 200 ng of template in a 50 μl PCR mix. The primers used were a represented by SEQ ID NO: 1823 and 1824; which include the AttB sites for Gateway recombination. The amplified PCR fragment was purified also using standard methods. The first step of the Gateway procedure, the BP reaction, was then performed, during which the PCR fragment recombined in vivo with the pDONR201 plasmid to produce, according to the Gateway terminology, an “entry clone”, pSAUR. Plasmid pDONR201 was purchased from Invitrogen, as part of the Gateway® technology.

[0786] The entry clone comprising the coding region of SEQ ID NO: 1163 was then used in an LR reaction with a destination vector used for Oryza sativa transformation. This vector contained as functional elements within the T-DNA borders: a plant selectable marker; a screenable marker expression cassette; and a Gateway cassette intended for LR in vivo recombination with the nucleic acid sequence of interest already cloned in the entry clone. A rice leaf-specific promoter (SEQ ID NO: 1825) for leaf-specific expression was located upstream of this Gateway cassette.

[0787] After the LR recombination step, the resulting expression vector pGOS2::SAUR was transformed into Agrobacterium strain LBA4044 according to methods well known in the art.

### 5. Dehydroascorbate Reductase (DHAR) Polypeptides

[0788] The nucleic acid sequence was amplified by PCR using as template a custom-made Solanum lycopersicum seedlings cDNA library (in pCMV Sport 6.0; Invitrogen, Paisley, UK). PCR was performed using Hifi Taq DNA polymerase in standard conditions, using 200 ng of template in a 50 μl PCR mix. The primers used were prm12191 (SEQ ID NO: 2252; sense, start codon in bold): 5′-ggggacaagtttgtacaaaaaagcaggcttaaacaatggttgttgaagtttgtgtc-3′ and prm12192 (SEQ ID NO: 2253; reverse, complementary): 5′-ggggaccactttgtacaagaa agctgggttcatacgttaaacctttg gag-3′, which include the AttB sites for Gateway recombination. The amplified PCR fragment was purified also using standard methods. The first step of the Gateway procedure, the BP reaction, was then performed, during which the PCR fragment recombined in vivo with the pDONR201 plasmid to produce, according to the Gateway terminology, an “entry clone”, pDHAR. Plasmid pDONR201 was purchased from Invitrogen, as part of the Gateway® technology.

[0789] The entry clone comprising SEQ ID NO: 1957 was then used in an LR reaction with a destination vector used for Oryza sativa transformation. This vector contained as functional elements within the T-DNA borders: a plant selectable marker; a screenable marker expression cassette; and a Gateway cassette intended for LR in vivo recombination with the nucleic acid sequence of interest already cloned in the entry clone. A rice GOS2 promoter (SEQ ID NO: 2251) for constitutive specific expression was located upstream of this Gateway cassette.

[0790] After the LR recombination step, the resulting expression vector pGOS2::DHAR (FIG. 9) was transformed into Agrobacterium strain LBA4044 according to methods well known in the art.

### Example 8

### Plant Transformation

### Rice Transformation

[0791] The Agrobacterium containing the expression vector was used to transform Oryza sativa plants. Mature dry seeds of the rice japonica cultivar Nipponbare were dehusked. Sterilization was carried out by incubating for one minute in 70% ethanol, followed by 30 minutes in 0.2% HgCl₂, followed by a 6 times 15 minutes wash with sterile distilled water. The sterile seeds were then germinated on a medium containing 2,4-D (callus induction medium). After incubation in the dark for four weeks, embryogenic, scutellum-derived calli were excised and propagated on the same medium. After two weeks, the calli were multiplied or propagated by subculture on the same medium for another 2 weeks. Embryogenic callus pieces were sub-cultured on fresh medium 3 days before co-cultivation (to boost cell division activity).

[0792] Agrobacterium strain LBA4404 containing the expression vector was used for co-cultivation. Agrobacterium was inoculated on AB medium with the appropriate antibiotics and cultured for 3 days at 28° C. The bacteria were then collected and suspended in liquid co-cultivation medium to a density (OD₆₀₀) of about 1. The suspension was then transferred to a Petri dish and the calli immersed in the suspension for 15 minutes. The callus tissues were then blotted dry on a filter paper and transferred to solidified, co-cultivation medium and incubated for 3 days in the dark at 25° C. Co-cultivated calli were grown on 2,4-D-containing medium for 4 weeks in the dark at 28° C. in the presence of a selection agent. During this period, rapidly growing resistant callus islands developed. After transfer of this material to a regeneration medium and incubation in the light, the embryogenic potential was released and shoots developed in the next four to five weeks. Shoots were excised from the calli and incubated for 2 to 3 weeks on an auxin-containing medium from which they were transferred to soil. Hardened shoots were grown under high humidity and short days in a greenhouse.

[0793] Approximately 35 independent T0 rice transformants were generated for one construct. The primary transformants were transferred from a tissue culture chamber to a greenhouse. After a quantitative PCR analysis to verify copy number of the T-DNA insert, only single copy transgenic plants that exhibit tolerance to the selection agent were kept for harvest of T1 seed. Seeds were then harvested three to five months after transplanting. The method yielded single locus transformants at a rate of over 50% (Aldemita and Hodges 1996, Chan et al. 1993, Hiei et al. 1994).

### Example 9

### Transformation of Other Crops

### Corn Transformation

[0794] Transformation of maize (Zea mays) is performed with a modification of the method described by Ishida et al. (1996) Nature Biotech 14(6): 745-50. Transformation is genotype-dependent in corn and only specific genotypes are amenable to transformation and regeneration. The inbred line A188 (University of Minnesota) or hybrids with A188 as a parent are good sources of donor material for transformation, but other genotypes can be used successfully as well. Ears are harvested from corn plant approximately 11 days after pollination (DAP) when the length of the immature embryo is about 1 to 1.2 mm. Immature embryos are cocultivated with Agrobacterium tumefaciens containing the expression vector, and transgenic plants are recovered through organogenesis. Excised embryos are grown on callus induction medium, then maize regeneration medium, containing the selection agent (for example imidazolinone but various selection markers can be used). The Petri plates are incubated in the light at 25° C. for 2-3 weeks, or until shoots develop. The green shoots are transferred from each embryo to maize rooting medium and incubated at 25° C. for 2-3 weeks, until roots develop. The rooted shoots are transplanted to soil in the greenhouse. T1 seeds are produced from plants that exhibit tolerance to the selection agent and that contain a single copy of the T-DNA insert.

### Wheat Transformation

[0795] Transformation of wheat is performed with the method described by Ishida et al. (1996) Nature Biotech 14(6): 745-50. The cultivar Bobwhite (available from CIMMYT, Mexico) is commonly used in transformation. Immature embryos are co-cultivated with Agrobacterium tumefaciens containing the expression vector, and transgenic plants are recovered through organogenesis. After incubation with Agrobacterium, the embryos are grown in vitro on callus induction medium, then regeneration medium, containing the selection agent (for example imidazolinone but various selection markers can be used). The Petri plates are incubated in the light at 25° C. for 2-3 weeks, or until shoots develop. The green shoots are transferred from each embryo to rooting medium and incubated at 25° C. for 2-3 weeks, until roots develop. The rooted shoots are transplanted to soil in the greenhouse. T1 seeds are produced from plants that exhibit tolerance to the selection agent and that contain a single copy of the T-DNA insert.

### Soybean Transformation

[0796] Soybean is transformed according to a modification of the method described in the Texas A&M U.S. Pat. No. 5,164,310. Several commercial soybean varieties are amenable to transformation by this method. The cultivar Jack (available from the Illinois Seed foundation) is commonly used for transformation. Soybean seeds are sterilised for in vitro sowing. The hypocotyl, the radicle and one cotyledon are excised from seven-day old young seedlings. The epicotyl and the remaining cotyledon are further grown to develop axillary nodes. These axillary nodes are excised and incubated with Agrobacterium tumefaciens containing the expression vector. After the cocultivation treatment, the explants are washed and transferred to selection media. Regenerated shoots are excised and placed on a shoot elongation medium. Shoots no longer than 1 cm are placed on rooting medium until roots develop. The rooted shoots are transplanted to soil in the greenhouse. T1 seeds are produced from plants that exhibit tolerance to the selection agent and that contain a single copy of the T-DNA insert.

### Rapeseed/Canola Transformation

[0797] Cotyledonary petioles and hypocotyls of 5-6 day old young seedling are used as explants for tissue culture and transformed according to Babic et al. (1998, Plant Cell Rep 17: 183-188). The commercial cultivar Westar (Agriculture Canada) is the standard variety used for transformation, but other varieties can also be used. Canola seeds are surface-sterilized for in vitro sowing. The cotyledon petiole explants with the cotyledon attached are excised from the in vitro seedlings, and inoculated with Agrobacterium (containing the expression vector) by dipping the cut end of the petiole explant into the bacterial suspension. The explants are then cultured for 2 days on MSBAP-3 medium containing 3 mg/l BAP, 3% sucrose, 0.7 Phytagar at 23° C., 16 hr light. After two days of co-cultivation with Agrobacterium, the petiole explants are transferred to MSBAP-3 medium containing 3 mg/l BAP, cefotaxime, carbenicillin, or timentin (300 mg/l) for 7 days, and then cultured on MSBAP-3 medium with cefotaxime, carbenicillin, or timentin and selection agent until shoot regeneration. When the shoots are 5-10 mm in length, they are cut and transferred to shoot elongation medium (MSBAP-0.5, containing 0.5 mg/l BAP). Shoots of about 2 cm in length are transferred to the rooting medium (MS0) for root induction. The rooted shoots are transplanted to soil in the greenhouse. T1 seeds are produced from plants that exhibit tolerance to the selection agent and that contain a single copy of the T-DNA insert.

### Alfalfa Transformation

[0798] A regenerating clone of alfalfa (Medicago sativa) is transformed using the method of (McKersie et al., 1999 Plant Physiol 119: 839-847). Regeneration and transformation of alfalfa is genotype dependent and therefore a regenerating plant is required. Methods to obtain regenerating plants have been described. For example, these can be selected from the cultivar Rangelander (Agriculture Canada) or any other commercial alfalfa variety as described by Brown DCW and A Atanassov (1985. Plant Cell Tissue Organ Culture 4: 111-112). Alternatively, the RA3 variety (University of Wisconsin) has been selected for use in tissue culture (Walker et al., 1978 Am J Bot 65:654-659). Petiole explants are cocultivated with an overnight culture of Agrobacterium tumefaciens C58C1 pMP90 (McKersie et al., 1999 Plant Physiol 119: 839-847) or LBA4404 containing the expression vector. The explants are cocultivated for 3 d in the dark on SH induction medium containing 288 mg/L Pro, 53 mg/L thioproline, 4.35 g/L K2SO4, and 100 μm acetosyringinone. The explants are washed in half-strength Murashige-Skoog medium (Murashige and Skoog, 1962) and plated on the same SH induction medium without acetosyringinone but with a suitable selection agent and suitable antibiotic to inhibit Agrobacterium growth. After several weeks, somatic embryos are transferred to BOi2Y development medium containing no growth regulators, no antibiotics, and 50 g/L sucrose. Somatic embryos are subsequently germinated on half-strength Murashige-Skoog medium. Rooted seedlings were transplanted into pots and grown in a greenhouse. T1 seeds are produced from plants that exhibit tolerance to the selection agent and that contain a single copy of the T-DNA insert.

### Cotton Transformation

[0799] Cotton is transformed using Agrobacterium tumefaciens according to the method described in U.S. Pat. No. 5,159,135. Cotton seeds are surface sterilised in 3% sodium hypochlorite solution during 20 minutes and washed in distilled water with 500 μg/ml cefotaxime. The seeds are then transferred to SH-medium with 50 μg/ml benomyl for germination. Hypocotyls of 4 to 6 days old seedlings are removed, cut into 0.5 cm pieces and are placed on 0.8% agar. An Agrobacterium suspension (approx. 108 cells per ml, diluted from an overnight culture transformed with the gene of interest and suitable selection markers) is used for inoculation of the hypocotyl explants. After 3 days at room temperature and lighting, the tissues are transferred to a solid medium (1.6 g/l Gelrite) with Murashige and Skoog salts with B5 vitamins (Gamborg et al., Exp. Cell Res. 50:151-158 (1968)), 0.1 mg/l 2,4-D, 0.1 mg/l 6-furfurylaminopurine and 750 μg/ml MgCL2, and with 50 to 100 μg/ml cefotaxime and 400-500 μg/ml carbenicillin to kill residual bacteria. Individual cell lines are isolated after two to three months (with subcultures every four to six weeks) and are further cultivated on selective medium for tissue amplification (30° C., 16 hr photoperiod). Transformed tissues are subsequently further cultivated on non-selective medium during 2 to 3 months to give rise to somatic embryos. Healthy looking embryos of at least 4 mm length are transferred to tubes with SH medium in fine vermiculite, supplemented with 0.1 mg/l indole acetic acid, 6 furfurylaminopurine and gibberellic acid. The embryos are cultivated at 30° C. with a photoperiod of 16 hrs, and plantlets at the 2 to 3 leaf stage are transferred to pots with vermiculite and nutrients. The plants are hardened and subsequently moved to the greenhouse for further cultivation.

### Example 10

### Phenotypic Evaluation Procedure

### 10.1 Evaluation Setup

[0800] Approximately 35 independent T0 rice transformants were generated. The primary transformants were transferred from a tissue culture chamber to a greenhouse for growing and harvest of T1 seed. Six or eight events, of which the T1 progeny segregated 3:1 for presence/absence of the transgene, were retained. For each of these events, approximately 10 T1 seedlings containing the transgene (hetero- and homo-zygotes) and approximately 10 T1 seedlings lacking the transgene (nullizygotes) were selected by monitoring visual marker expression. The transgenic plants and the corresponding nullizygotes were grown side-by-side at random positions. Greenhouse conditions were of shorts days (12 hours light), 28° C. in the light and 22° C. in the dark, and a relative humidity of 70%. Plants grown under non-stress conditions were watered at regular intervals to ensure that water and nutrients were not limiting and to satisfy plant needs to complete growth and development.

[0801] For some T1 experiments, four T1 events were further evaluated in the T2 generation following the same evaluation procedure as for the T1 generation but with more individuals per event. From the stage of sowing until the stage of maturity the plants were passed several times through a digital imaging cabinet. At each time point digital images (2048×1536 pixels, 16 million colours) were taken of each plant from at least 6 different angles.

### Drought Screen (FLA-Like Polypeptides—DHAR Polypeptides)

[0802] Plants from T2 seeds were grown in potting soil under normal conditions until they approached the heading stage. They were then transferred to a “dry” section where irrigation was withheld. Humidity probes were inserted in randomly chosen pots to monitor the soil water content (SWC). When SWC goes below certain thresholds, the plants were automatically re-watered continuously until a normal level was reached again. The plants were then re-transferred again to normal conditions. The rest of the cultivation (plant maturation, seed harvest) was the same as for plants not grown under abiotic stress conditions. Growth and yield parameters were recorded as detailed for growth under normal conditions.

### Nitrogen Use Efficiency Screen (GDH Polypeptides—SAUR Polypeptides)

[0803] Rice plants from T2 seeds were grown in potting soil under normal conditions except for the nutrient solution. The pots were watered from transplantation to maturation with a specific nutrient solution containing reduced N nitrogen (N) content, usually between 7 to 8 times less. The rest of the cultivation (plant maturation, seed harvest) was the same as for plants not grown under abiotic stress. Growth and yield parameters were recorded as detailed for growth under normal conditions.

### Salt Stress Screen (SAUR Polypeptides)

[0804] Plants were grown on a substrate made of coco fibers and argex (3 to 1 ratio). A normal nutrient solution was used during the first two weeks after transplanting the plantlets in the greenhouse. After the first two weeks, 25 mM of salt (NaCl) was added to the nutrient solution, until the plants were harvested. Seed-related parameters were then measured.

10.2 Statistical Analysis: F test

[0805] A two factor ANOVA (analysis of variants) was used as a statistical model for the overall evaluation of plant phenotypic characteristics. An F test was carried out on all the parameters measured of all the plants of all the events transformed with the gene of the present invention. The F test was carried out to check for an effect of the gene over all the transformation events and to verify for an overall effect of the gene, also known as a global gene effect. The threshold for significance for a true global gene effect was set at a 5% probability level for the F test. A significant F test value points to a gene effect, meaning that it is not only the mere presence or position of the gene that is causing the differences in phenotype.

[0806] Where two experiments with overlapping events were carried out (T1 and T2 events), a combined analysis was performed. This is useful to check consistency of the effects over the two experiments, and if this is the case, to accumulate evidence from both experiments in order to increase confidence in the conclusion. The method used was a mixed-model approach that takes into account the multilevel structure of the data (i.e. experiment—event—segregants). P values were obtained by comparing likelihood ratio test to chi square distributions.

### 10.3 Parameters Measured

### Biomass-Related Parameter Measurement

[0807] From the stage of sowing until the stage of maturity the plants were passed several times through a digital imaging cabinet. At each time point digital images (2048×1536 pixels, 16 million colours) were taken of each plant from at least 6 different angles.

[0808] The plant aboveground area (or leafy biomass, areamax) was determined by counting the total number of pixels on the digital images from aboveground plant parts discriminated from the background. This value was averaged for the pictures taken on the same time point from the different angles and was converted to a physical surface value expressed in square mm by calibration. Experiments show that the aboveground plant area measured this way correlates with the biomass of plant parts above ground. The above ground area is the area measured at the time point at which the plant had reached its maximal leafy biomass. The early vigour is the plant (seedling) aboveground area three weeks post-germination. Increase in root biomass is expressed as an increase in total root biomass (measured as maximum biomass of roots observed during the lifespan of a plant, rootmax); or as an increase in the root/shoot index (measured as the ratio between root mass and shoot mass in the period of active growth of root and shoot).

[0809] Early vigour (EmerVigor) was determined by counting the total number of pixels from aboveground plant parts discriminated from the background. This value was averaged for the pictures taken on the same time point from different angles and was converted to a physical surface value expressed in square mm by calibration. The results described below are for plants three weeks post-germination.

### Seed-Related Parameter Measurements

[0810] The mature primary panicles were harvested, counted, bagged, barcode-labelled and then dried for three days in an oven at 37° C. The panicles were then threshed and all the seeds were collected and counted (firstpan). The filled husks were separated from the empty ones using an air-blowing device. The empty husks were discarded and the remaining fraction was counted again. The filled husks were weighed on an analytical balance. The number of filled seeds was determined by counting the number of filled husks that remained after the separation step. The total seed yield (totalwgseeds) was measured by weighing all filled husks harvested from a plant. Total seed number per plant was measured by counting the number of husks harvested from a plant. Thousand Kernel Weight (TKW) is extrapolated from the number of filled seeds counted and their total weight. The Harvest Index (HI) in the present invention is defined as the ratio between the total seed yield and the above ground area (mm²), multiplied by a factor 10⁶. The total number of flowers per panicle as defined in the present invention is the ratio between the total number of seeds and the number of mature primary panicles. The seed fill rate as defined in the present invention is the proportion (expressed as a %) of the number of filled seeds over the total number of seeds (or florets).

### Examples 11

### Results of the Phenotypic Evaluation of the Transgenic Plants

### 1. Glutamate Dehydrogenase (GDH) Polypeptides

[0811] a) Oryza sativa Transformed with pGOS2::ZmGDH

[0812] Plants were evaluated in both T1 and T2 generation. When grown under non-stress conditions, the transgenic plants showed an increase in above ground area (areamax), early vigour, root growth and seed yield. Details are given in Tables G1 and G2 below:

TABLE G1
Data summary of the evaluation of T1 pGOS2::ZmGDH transgenics
under non-stress conditions. For each parameter, the percentage overall
increase is shown, for each the p-value was ≦0:05.

| Parameter | Overall |
|---|---|
| EmerVigor | 10.9 |
| firstpan | 14.8 |
| nrtotalseed | 11.8 |

TABLE G2
Data summary of the evaluation of T2 pGOS2::ZmGDH transgenics
under non-stress conditions. For each parameter, the percentage overall
increase is shown, for each the p-value was ≦ 0:05.

| Parameter | Overall |
|---|---|
| EmerVigor | 21.4 |
| RootMax | 9.5 |
| totalwgseeds | 11.9 |
| nrfilledseed | 13.0 |
| harvestindex | 9.1 |
| nrtotalseed | 11.9 |
| RootThickMax | 10.1 |

[0813] When pGOS2::ZmGDH transgenics was grown under conditions of nitrogen limitation (nutrient stress), there was a tendency for increased TKW and early vigour.

b) Oryza sativa Transformed with pRCc3::ZmGDH

[0814] Plants were evaluated in T1 generation. When grown under non-stress conditions, the transgenic plants showed an increase in above ground area (areamax), early vigour, root growth and seed yield. Details are given in Table G3:

TABLE G3
Data summary of the evaluation of T1 pRCc3::ZmGDH transgenics
under non-stress conditions. For each parameter, the percentage
overall increase is shown, for each the p-value was ≦0:05.

| Parameter | Overall |
|---|---|
| totalwgseeds | 9.2 |
| nrfilledseed | 7.9 |
| harvestindex | 7.9 |
| nrtotalseed | 6.7 |

[0815] When grown under conditions of nitrogen limitation, an increase was observed for early vigour, root growth (root/shoot index), and seed yield (higher total weight of seeds, number of filled seeds, fill rate, harvest index and number of flowers per panicle).

c) Oryza sativa Transformed with pGOS2::OsGDH

[0816] Plants were evaluated in T1 generation. When grown under non-stress conditions, the transgenic plants showed an increase in above ground area (areamax) and seed yield (total weight of seeds, number of filled seeds, fill rate, number of flowers per panicle, harvest index, TKW, number of first panicles). Details are given in Table G4:

TABLE G4
Data summary of the evaluation of T1 pGOS2::OsGDH transgenics
under non-stress conditions. For each parameter, the percentage overall
increase is shown, for each the p-value was ≦0:05.

| Parameter | Overall |
|---|---|
| AreaMax | 6.5 |
| totalwgseeds | 11.5 |
| nrfilledseed | 12.1 |
| flowerperpan | 6.3 |
| nrtotalseed | 7.6 |

[0817] When grown under conditions of nitrogen limitation, an increase was observed for above ground area, early vigour, root growth (rootmax & root/shoot index), and seed yield (higher total weight of seeds, number of filled seeds, fill rate, and number of flowers per panicle).

d) Oryza sativa Transformed with pRCc3::OsGDH

[0818] Plants were evaluated in T1 generation. When grown under non-stress conditions, the transgenic plants showed an increase in above ground area (areamax) and had an increased number of flowers per panicle and number of first panicles

[0819] When grown under conditions of nitrogen limitation, an increase was observed for number of filled seeds and fill rate (overall increase of 6.2%, with a p-value≦0:05).

### 2. Fasciclin-Like AGP (FLAB) Polypeptides

[0820] The results of the evaluation of transgenic rice plants in the T1 generation and expressing a nucleic acid comprising the Open Reading Frame of SEQ ID NO: 171 encoding SEQ ID NO: 172 under non-stress conditions are presented below (Table G5). See previous Examples for details on the generations of the transgenic plants.

[0821] The results of the evaluation of transgenic rice plants under drought conditions (drought screen above) are presented below (Table G5). An increase of at least 5% was observed for total seed yield (totalwgseeds), number of filled seeds (nrfilledseed), fill rate (fillrate), number of flowers per panicle, harvest index (harvestindex).

TABLE G5
Data summary for transgenic rice plants; for each parameter, the overall
effect in the transgenic plant compared to the control plant is shown for
the (T1 generation), for each parameter the p-value is <0.05.

| | transgenic compared |
|---|---|
| Trait | to control plants (%) |
| RootMax | 5.4 |
| totalwgseeds | 34.9 |
| fillrate | 50.1 |
| harvestindex | 50.3 |
| nrfilledseed | 35.1 |

### 3. Small Auxin-Up RNA (SAUR) Polypeptides

[0822] The results of the evaluation of transgenic rice plants in the T1 generation and expressing a nucleic acid comprising the longest region in SEQ ID NO: 501 encoding SEQ ID NO: 502 under non-stress conditions are presented below. See previous Examples for details on the generations of the transgenic plants.

[0823] The results of the evaluation of transgenic rice plants under non-stress conditions are presented below. An increase of at least 5% was observed for aboveground biomass (AreaMax), early vigour (EmerVigor), total seed yield (totalwgseeds), number of filled seeds (nrfilledseed), number of first panicles and (firstpan fill rate, number of flowers per panicle (nrtotalseed) (Table G6).

TABLE G6
Data summary for transgenic rice plants compared to the control plants
and expressed in percentage; for each parameter, the overall percent
increase is shown for the confirmation (T2 generation), for each
parameter the p-value is <0.05.

| Parameter: | |
|---|---|
| Yield trait | Overall |
| AreaMax | 13.0 |
| EmerVigor | 11.2 |
| totalwgseeds | 12.5 |
| nrfilledseed | 14.6 |
| firstpan | 20.2 |
| nrtotalseed | 18.2 |

[0824] When the plants were grown under Nitrogen limiting conditions as described in the Nitrogen screen above the transgenic plants showed enhanced production of first panicles (11.3% increase) relative to the control plants.

[0825] The results of the evaluation of transgenic rice plants expressing a nucleic acid comprising the longest region in SEQ ID NO: 2210 encoding SEQ ID NO: 2211 under low nitrogen conditions gave an increase of at least 5% for TKW with a p-value in the F-test of 0. Most events also showed an increase in plant height compared to corresponding nulizygotes.

[0826] The results of the evaluation of transgenic rice plants expressing a nucleic acid comprising the longest region in SEQ ID NO: 2210 encoding SEQ ID NO: 2211 under non-stress conditions gave an increase of at least 5% for total seed weight and TKW. The following parameters also showed an increase compared to corresponding nulizygotes: aboveground biomass, root biomass, harvest index, fill rate, total number of seeds and number of first panicles.

### 4. SAUR Polypeptides, or SYNP Polypeptides, or Fusion Proteins of SAUR Polypeptides and SYNP Polypeptides

[0827] The results of the evaluation of transgenic rice plants in the T1 generation and expressing a nucleic acid comprising the longest region in SEQ ID NO: 1163 encoding SEQ ID NO: 1164 under non-stress conditions are presented below. See previous Examples for details on the generations of the transgenic plants.

[0828] The results of the evaluation of transgenic rice plants under non-stress conditions are presented below. An increase of at least 5% was observed for aboveground biomass (AreaMax), early vigour (EmerVigor), total seed yield (totalwgseeds), number of filled seeds (nrfilledseed), number of first panicles and (firstpan fill rate, number of flowers per panicle (nrtotalseed) (Table G7).

TABLE G7
Data summary for transgenic rice plants compared to the control plants
and expressed in percentage; for each parameter, the overall percent
increase is shown for the confirmation (T2 generation), for each
parameter the p-value is <0.05.

| Parameter: Yield trait | Overall |
|---|---|
| Area Max | 13.0 |
| EmerVigor | 11.2 |
| totalwgseeds | 12.5 |
| nrfilledseed | 14.6 |
| firstpan | 20.2 |
| nrtotalseed | 18.2 |

[0829] When the plants were grown under Nitrogen limiting conditions as described in the Nitrogen screen above the transgenic plants showed enhanced production of first panicles (11.3% increase) relative to the control plants.

### 5. Dehydroascorbate Reductase (DHAR) Polypeptides

[0830] The results of the evaluation of transgenic rice plants in the T2 generation and expressing a nucleic acid comprising the longest Open Reading Frame in SEQ ID NO: 1957 under non-stress conditions are presented below. See previous Examples for details on the generations of the transgenic plants.

[0831] The results of the evaluation of transgenic rice plants in the T2 generation and expressing a nucleic acid encoding the polypeptide of SEQ ID NO: 1958 under non-stress conditions are presented below in Table G8. When grown under non-stress conditions, an increase of at least 5% was observed for root biomass (RootMax—total root biomass and RootThickMax—amount of thick roots), and for seed yield (Totalwgseeds—total weight of seeds, Nrfilledseed—number of filled seeds, Harvestindex—harvest index, EmerVigor—vigour of the seedlings, Nrtotalseed—number of florets of a plant, and Firstpan—the number of panicles in the first flush).

TABLE G8
Data summary for transgenic rice plants; for each parameter, the overall
percent increase is shown for the confirmation (T2 generation), for
each parameter the p-value is <0.05 and above the 5% threshold.

| Parameter | Overall |
|---|---|
| EmerVigor | 20.8 |
| RootMax | 12.3 |
| totalwgseeds | 26.3 |
| nrtotalseed | 20.3 |
| harvestindex | 15.0 |
| firstpan | 20.9 |
| nrfilledseed | 28.9 |
| RootThickMax | 9.1 |

### Example 12

### Transgenic Plants Transformed with GDH of Physcomitrella patens 126976 Show Increased Yield Related Traits

[0832] Rice plants are transformed with a construct comprising a nucleic acid encoding PpGDH (SEQ ID NO: 77) essentially as described in Examples 7 and 8, and are evaluated as described in Example 10. The transformed rice plants show increased yield related traits, compared to the control plants.

### Example 13

### Identification of SAUR Interacting Proteins

[0833] The SAUR polypeptides of Table A originating from Arabidopsis thaliana, as represented by SEQ ID NO: 2n, wherein “n” is any numeral from 1 to 81, were used to identified proteins that interact with any of said SAUR proteins by means of the silico interaction techniques “AtPID” (ian Cui, Peng Li, Guang Li, Feng Xu, Chen Zhao, Yuhua Li, Zhongnan Yang, Guang Wang, Qingbo Yu, Yixue Li, and Tieliu Shi AtPID: Arabidopsis thaliana protein interactome database an integrative platform for plant systems biology. Nucleic Acids Research, 2008, Vol. 36, Database issue D999-D1008). Version3.00 AtPID was used. This database includes 28,062 protein-protein interaction pairs involving 12,506 proteins with 23,396 pairs from prediction methods, while the other 4,666 pairs involving 2,285 proteins are manually curated from literatures. In addition, subcellular localizations of 5,562 proteins are also included. A number of SAUR interacting proteins was identified: “total SAUR inteactome”

[0834] “In silico interaction technique” as used herein refers to any method to identify proteins that interact with a query sequence mediated by a computer support. Such interactions may be experimentally verified by biochemical methods or may be computer predicted using specialized algorithms. An example of “In silico interaction technique” is that of that encompassing searches on the AtPID database. The AtPID (Arabidopsis thaliana Protein Interactome Database) represents a centralized platform to depict and integrate the information pertaining to protein-protein interaction networks, domain architecture, ortholog information and GO (Gene onthology annotation in the Arabidopsis thaliana proteome. The Protein-protein interaction pairs are predicted by integrating several methods with the Naive Baysian Classifier. All other related information curated in the AtPID is manually extracted from published literatures and other resources from some expert biologists.

### Example 14

### Identification of SAUR Co-Expressed Genes

[0835] The SAUR polynucleotides of Table A4 originating from Arabidopsis thaliana, as represented by SEQ ID NO: 2n+1, wherein “n” is any numeral from 1 to 80, were used to identified co-regulated genes in Arabidopsis thaliana using the ATTED-II platform (Obayashi 2007. Nucleic Acids Res. 2007 January; 35(Database issue):D863-9). Atted-II platform refers to a database ATTED-II as described by Obayashi et al. 2007 comprising Arabidopsis thaliana trans-factor and cis-element prediction database (ATTED-II) that provides co-regulated gene relationships based on co-expressed genes deduced from experimentally reported microarray data and the predicted cis elements. ATTED-II (http://www.atted.bio.titech.ac.jp) includes the following features: (i) lists and networks of co-expressed genes calculated from 58 publicly available experimental series, which are composed of 1388 GeneChip data in A. thaliana; (ii) prediction of cis-regulatory elements in the 200 bp region upstream of the transcription start site to predict co-regulated genes amongst the co-expressed genes; and (iii) visual representation of expression patterns for individual genes. A number of SAUR co-regulated genes were identified: “total SAUR co-regulated genes”.

### Example 15

### Identification of SAUR Yield Network Proteins

[0836] The term “SAUR yield network proteins” as used herein refer to proteins having the capacity to enhance yield related traits, said capacity mediated by the effect of a SAUR gene or SAUR polypeptide.

[0837] On a selection step, a selection of genes and/or proteins out of the two groups of data sets, “total SAUR co-regulated genes” and the “total SAUR inteactome” and having the capacity to enhanced yield related trait mediated by a SAUR gene or SAUR protein was made (Table E). The selected group of genes and proteins represent the SAUR yield network proteins (SYNP) of Arabidopsis thaliana.

TABLE E
SAUR yield network proteins (SYNP) of Arabidopsis thaliana.

| | Nucleic acid | Polypeptide |
|---|---|---|
| Name, AGI code | SEQ ID NO: | SEQ ID NO: |
| AT1G04880 | 664 | 665 |
| AT1G26480 | 666 | 667 |
| AT1G68090 | 668 | 669 |
| AT1G68750 | 670 | 671 |
| AT1G74500 | 672 | 673 |
| AT1G77980 | 674 | 675 |
| AT2G24450 | 676 | 677 |
| AT2G32460 | 678 | 679 |
| AT2G45610 | 680 | 681 |
| AT3G04700 | 682 | 683 |
| AT3G06260 | 684 | 685 |
| AT3G46520 | 686 | 687 |
| AT3G61160 | 688 | 689 |
| AT4G00870 | 690 | 691 |
| AT4G36540 | 692 | 693 |
| AT5G01700 | 694 | 695 |
| AT5G04180 | 696 | 697 |
| AT5G20390 | 698 | 699 |
| AT5G48650 | 700 | 701 |
| AT5G67110 | 702 | 703 |

### Example 16

### Identification of Homologues of SAUR Yield Network Proteins (SYNP) of Arabidopsis thaliana: Paralogous and Orthologous Proteins and Genes Encoding the Same

[0838] Paralogous and orthologous genes of those of Table E were identified using the method described in Example 1. Paralogous and orthologous proteins and genes encoding the same were selected amongst those originating from organisms of the viridiplantae kingdom (Table F).

| | Nucleic acid | Polypeptide |
|---|---|---|
| Name SYNP homologue | SEQ ID NO: | SEQ ID NO: |
| Homologue 1 | 704 | 705 |
| Homologue 2 | 706 | 707 |
| Homologue 3 | 708 | 709 |
| Homologue 4 | 710 | 711 |
| Homologue 5 | 712 | 713 |
| Homologue 6 | 714 | 715 |
| Homologue 7 | 716 | 717 |
| Homologue 8 | 718 | 719 |
| Homologue 9 | 720 | 721 |
| Homologue 10 | 722 | 723 |
| Homologue 11 | 724 | 725 |
| Homologue 12 | 726 | 727 |
| Homologue 13 | 728 | 729 |
| Homologue 14 | 730 | 731 |
| Homologue 15 | 732 | 733 |
| Homologue 16 | 734 | 735 |
| Homologue 17 | 736 | 737 |
| Homologue 18 | 738 | 739 |
| Homologue 19 | 740 | 741 |
| Homologue 20 | 742 | 743 |
| Homologue 21 | 744 | 745 |
| Homologue 22 | 746 | 747 |
| Homologue 23 | 748 | 749 |

1-115. (canceled)

116. A method for enhancing a yield-related trait in a plant relative to a corresponding control plant, comprising modulating expression in a plant of a nucleotide sequence comprising one of:
a. a first nucleic acid encoding at least a small auxin-up RNA (SAUR) polypeptide and a second nucleic acid encoding one or more SAUR Yield Network Protein (SYNP) polypeptides, or a nucleic acid encoding a protein fusion between at least a SAUR polypeptide and one or more SYNP polypeptides, wherein the first and second nucleic acids are comprised in a single nucleic acid molecule or in at least two nucleic acid molecules;
b. a nucleic acid encoding a glutamate dehydrogenase (GDH) polypeptide, wherein said GDH polypeptide is a NAD-dependent GDH having glutamate dehydrogenase activity;
c. a nucleic acid encoding a polypeptide comprising a Fasciclin-like (FLA-like) polypeptide;
d. a nucleic acid encoding a SAUR polypeptide, wherein said SAUR polypeptide comprises an Auxin inducible domain; or
e. a nucleic acid encoding a dehydroascorbate reductase (DHAR) polypeptide, wherein said DHAR polypeptide comprises at least a DHAR domain with accession number PTHR11260:SF15.

117. The method of claim 116,
a. wherein
(i) the SAUR polypeptide has at least 25% overall sequence identity to any one of the polypeptide sequences of Table A4, or to SEQ ID NO: 1164 or a variant thereof,
(ii) the SYNP polypeptide has at least 25% overall sequence identity to any one of the polypeptide sequences of Table E or Table F;
b. wherein said GDH polypeptide comprises one or more of the motifs 1 to 20 (SEQ ID NO: 3 to SEQ ID NO: 22);
c. wherein said FLA-like polypeptide comprises at least one, two, three, or four fasciclin-like domains having at least 25% sequence identity to the amino acid sequence:
(i) TITVCAVDNAGMSDLLSKQLSIYTIKNVLSFRVLLDYFDAKKLHQITNG TALAATMFQATGSATGSSGFVNITDLRGGKVGLSPADYNGPPPAKFVK SIAEIPYNISVIQISTIL (SEQ ID NO: 487) which corresponds to the N-term FLA_like domain in SEQ ID NO: 172, or
(ii) VDGGVTIFCPRDDAMKKFLPKFKNLTAEGKQSLLEYHGIPIYQSISNLKS NNGDMNTLATDGAKKYAVVIQNDGEDVTIKTKIVTAKITATVVDKLPL AIYSLDKVL (SEQ ID NO: 488) which corresponds to the C-term FLA_like domain in SEQ ID NO: 172;
d. wherein said SAUR polypeptide comprises one or more of the following motifs:
(i)
Motif 23:
(SEQ ID NO: 1155)
LAVYVGEMMQKRRFVVPVTYLSHPCFQKLLRKAEEEFGFDHPMGGLTI
PC,
(ii)
Motif 24:
(SEQ ID NO: 1156)
KHxxGVYTAEKxxYxxxIxxxxxxxxxAxxxxSxxxYxxxxPMPIxLx
xC,
(iii)
Motif 25:
(SEQ ID NO: 1157)
LQSSKQLLKSLSHSSNNVAIP,
(iv)
Motif 26:
(SEQ ID NO: 1158)
VxxxKIAxKSQ,
(v)
Motif 27:
(SEQ ID NO: 1159)
EQIFIDLASRL,
(vi)
Motif 28:
(SEQ ID NO: 1159)
VExxxVxxxxL,
wherein X represents any amino acid;
e. wherein said SAUR polypeptide is a SAUR33-like polypeptide and comprises Motifs 47 and 48 and optionally also one or both of Motifs 49 and 50 or any sequence having at least 50% sequence identity to Motifs 47 to 50, wherein Motif 47 is CEVVLFEHLLWMLENADPQ (SEQ ID NO: 2284), Motif 48 is PESLDELVEYYAC (SEQ ID NO: 2285), Motif 49 is GLSKLRCMIRRHSSSRI (SEQ ID NO: 2286) and Motif 50 is SFHGADEVPKGLHPVYVGKSRRRYLIAEELVGHPLFQNLVDRT (SEQ ID NO: 2287);
f. wherein the DHAR domain of the DHAR polypeptide has at least 49% sequence identity to the amino acid sequence located between amino acid 19 and 210 of SEQ ID NO 1958;
g. wherein said DHAR polypeptide comprises motifs having at least 49% sequence identity to any one of the following motifs:
(i)
Motif 35:
(SEQ ID NO: 2239)
P[DN]KLGDCPF[SC]QRVLLTLEEK[KH][VL]PY[KD][ML][KH]
L[IV],
(ii)
Motif 36:
(SEQ ID NO: 2240)
D[DEG]KW[VI][PAS]DSDVI[TV][QG][IL][LI]EEK[YF]PEP
[SP]L[VA]TPPE,
(iii)
Motif 37:
(SEQ ID NO: 2241)
P[FY][IV][NA]GE[KN][IV][ST]A[VA]DLSL[AG]PKLYHLE[V
I]ALGH[FY]K[KN]W[ST][VI]P;
h. wherein said DHAR polypeptide comprises any one or more sequence motifs having at least 49% sequence identity to any one of the following motifs:
(i)
Motif 38:
(SEQ ID NO: 2242)
E[VI]CVKA[AS]V[GT]AP[DN][KV]LGDCPF[SC]QRVLLTLEE,
(ii)
Motif 39:
(SEQ ID NO: 2243)
PPE[FK]ASVGSKIF[PS][TS]F[VI][GT]FLKSKD[PA][NS]DG
[TS]EQ,
(iii)
Motif 40:
(SEQ ID NO: 2243)
[IV][ST]A[VA]DLSL[AG]PKLYHL[EQ][VI]ALGH[FY]K[KN]
W[ST][VI]P[ED]S L[TP]HV[HK][NS]Y[MT]K[ALS][LI]FS
[RL][ED]SF[EV]KT;
i. wherein said DHAR polypeptide comprises any one or more of the following sequence motifs or an amino acid sequence having at least 49% sequence identity to any one of the following sequence motifs:
(i)
Motif 41:
(SEQ ID NO: 2244)
E[IV]CVKAA[VT]GAPD[VIT]LGDCPF[SC]QRVLLTLEE,
(ii)
Motif 42:
(SEQ ID NO: 2245)
PPE[FY]ASVGSKIF[PG][ST]FV[TK]FLKSKD[AP][NS]DG
[TS]E[QK]
(iii)
Motif 43:
(SEQ ID NO: 2246)
[IV][TS]AVDLSLAPKLYHL[EQ]VAL[GE]HFK[KG]W[TSK]
[VI]PE[SN]LTHVH[NA]Y[TM]K[LAS]LFSRESFEKT;
j. wherein said DHAR polypeptide comprises any one or more of the following sequence motifs or an amino acid sequence having at least 49% sequence identity to any one of the following motifs:
(i)
Motif 44:
(SEQ ID NO: 2247)
PLE[VI]C[VA]KAS[ILV]T[TV]P[ND][KR]LGDCPF[TC]QRVLL
TLEEKHLPY[DE][ML]KLVDL[SG]NKP[ED]WF,
(ii)
Motif 45:
(SEQ ID NO: 2248)
PPE[VI][PA]DSDVITQ[AST]LEEK[YF]P[ED]P[PS]L[AV]TPP
EKASVGSKIFSTF[IV]GFLKSKDP[SN]DG,
(iii)
Motif 46:
(SEQ ID NO: 2249)
QALL[ND]EL[ST][SA]FNDY[LI]KENGPFING[KE][KDE][IV]S
AADLSL[GA]PKLYH[LM]EIALGH[YF]K[NK]W;
k. wherein the DHAR polypeptide has at least 25% overall sequence identity to any of the amino acid sequences depicted in Table A, or the amino acid sequence of SEQ ID NO: 1958.

118. The method of claim 116, wherein said modulated expression is effected by introducing and expressing the nucleotide sequence in a plant.

119. The method of claim 116, wherein
a. the nucleic acid encoding a SAUR polypeptide encodes any one of the proteins listed in Table A3 or A3(i), or is a portion of such a nucleic acid, or a nucleic acid capable of hybridizing with such a nucleic acid;
b. the nucleic acid encoding a GDH polypeptide encodes any one of the proteins listed in Table A1, or is a portion of such a nucleic acid, or a nucleic acid capable of hybridizing with such a nucleic acid;
c. the nucleic acid encoding a FLA-like polypeptide encodes any one of the proteins listed in Table A2, or is a portion of such a nucleic acid, or a nucleic acid capable of hybridizing with such a nucleic acid; or
d. the nucleic acid encoding a DHAR polypeptide encodes any one of the proteins listed in Table A5, or is a portion of such a nucleic acid, or a nucleic acid capable of hybridizing with such a nucleic acid.

120. The method of claim 116,
a. wherein the nucleic acid sequence encoding a SAUR polypeptide encodes an orthologue or paralogue of any of the proteins given in Table A3 or A3(i);
b. wherein the nucleic acid sequence encoding a GDH polypeptide encodes an orthologue or paralogue of any of the proteins given in Table A1;
c. wherein the nucleic acid sequence encoding a FLA-like polypeptide encodes an orthologue or paralogue of any of the proteins given in Table A2; or
d. wherein the nucleic acid sequence encoding a DHAR polypeptide encodes an orthologue or paralogue of any of the proteins given in Table A5.

121. The method of claim 116, wherein the enhanced yield-related trait comprises increased early vigour, increased yield, increased biomass, and/or increased seed yield relative to a corresponding control plant.

122. The method of claim 116, wherein the enhanced yield-related trait is obtained under non-stress conditions.

123. The method of claim 116, wherein the enhanced yield-related trait is obtained under conditions of nitrogen deficiency, under conditions of drought stress, or under conditions of salt stress.

124. The method of claim 118, wherein the nucleic acid is operably linked to one of
(i) a constitutive promoter, a GOS2 promoter, or a GOS2 promoter from rice;
(ii) a root specific promoter, a RCc3 promoter, or a RCc3 promoter from rice; or
(iii) a tissue-specific promoter, a leaf specific promoter, or a promoter comprising the nucleic acid sequence of SEQ ID NO: 1163.

125. The method of claim 116, wherein the nucleic acid is of plant origin, from a dicotyledonous plant, or from a monocotyledonous plant.

126. A transgenic plant or part thereof, including seeds, obtained by the method of claim 116, wherein said transgenic plant or part thereof comprises one of:
a. (i) a first nucleic acid encoding at least a SAUR polypeptide selected from the group consisting of the polypeptides of Table A4 or a homologue or derivative thereof, and (ii) a second nucleic acid encoding one or more SYNP polypeptides selected from the group consisting of the polypeptides of Tables E and F or a homologue or derivative thereof; or a nucleic acid encoding a protein fusion between any two polypeptides of (i) and (ii), wherein the first and second nucleic acids are comprised in a single nucleic acid molecule or in at least two nucleic acid molecules;
b. a recombinant nucleic acid encoding a GDH polypeptide;
c. a recombinant nucleic acid encoding a FLA-like polypeptide;
d. a recombinant nucleic acid encoding a SAUR polypeptide; or
e. a recombinant nucleic acid encoding a DHAR polypeptide.

127. A construct comprising:
(i) a nucleic acid encoding a polypeptide as defined in claim 116;
(ii) one or more control sequences capable of driving expression of the nucleic acid sequence of (i); and optionally
(iii) a transcription termination sequence.

128. The construct of claim 127, wherein one of said control sequences is one of:
(i) a constitutive promoter, a GOS2 promoter, or a GOS2 promoter from rice;
(ii) a root specific promoter, an RCc3 promoter, or an RCc3 promoter from rice; or
(iii) a tissue-specific promoter, a leaf specific promoter, or a promoter comprising the nucleic acid sequence of SEQ ID NO: 1163.

129. A method for making a plant having increased early vigour, increased yield, increased biomass, and/or increased seed yield relative to a control plant, comprising transforming a plant, plant part, or plant cell with the construct of claim 127.

130. A plant, plant part, or plant cell comprising the construct of claim 127.

131. A method for the production of a transgenic plant having increased early vigour, increased yield, increased biomass, and/or increased seed yield relative to a corresponding control plant, comprising:
(i) introducing and expressing in a plant a nucleic acid encoding a polypeptide as defined in claim 116; and
(ii) cultivating the plant under conditions promoting plant growth and development.

132. A transgenic plant having increased early vigour, increased yield, increased biomass, and/or increased seed yield relative to a corresponding control plant, resulting from modulated expression of a nucleic acid encoding a polypeptide as defined in claim 116, or a transgenic plant cell derived from said transgenic plant.

133. The transgenic plant of claim 126, or a transgenic plant cell derived therefrom, wherein said transgenic plant is a crop plant, a monocot, a cereal, rice, maize, wheat, barley, millet, rye, triticale, sorghum, emmer, spelt, secale, einkorn, teff, milo, or oats.

134. Harvestable parts of the plant of claim 133, wherein said harvestable parts are shoot biomass, root biomass, and/or seeds.

135. Products derived from the transgenic plant of claim 133 and/or from harvestable parts of said plant, wherein said harvestable parts are shoot biomass, root biomass, and/or seeds.

136. An isolated nucleic acid molecule comprising one of:
(i) the nucleic acid sequence of SEQ ID NO: 99, SEQ ID NO: 1997, SEQ ID NO: 2121, or SEQ ID NO: 2193, or the complement thereof;
(ii) a nucleic acid encoding a polypeptide having at least 50% sequence identity to the amino acid sequence of SEQ ID NO: 176, and comprising an amino acid sequence having at least 50% sequence identity to any one of the motifs 4 to 6 (SEQ ID NO: 6 to 8);
(iii) a nucleic acid encoding a DHAR polypeptide comprising the amino acid sequence of any one of SEQ ID NO: 1998, SEQ ID NO: 2122 and SEQ ID NO: 2194, and conferring an enhanced yield related trait to a plant relative to a corresponding control plant;
(iv) a nucleic acid having at least 50% sequence identity to any of the nucleic acid sequences of Table A5 and conferring an enhanced yield related trait to a plant relative to a corresponding control plant;
(v) a nucleic acid encoding a DHAR polypeptide having at least 50% sequence identity to the amino acid sequence of any one of SEQ ID NO: 1998, SEQ ID NO: 2122, SEQ ID NO: 2194 and any of the other amino acid sequences in Table A5, and conferring an enhanced yield related trait to a plant relative to a corresponding control plant; or
(vi) a nucleic acid molecule which hybridizes with a nucleic acid molecule of (i) to (v) under stringent hybridization conditions and confers an enhanced yield related trait to a plant relative to a corresponding control plant.

137. An isolated polypeptide comprising one of
(i) the amino acid sequence of SEQ ID NO: 176, SEQ ID NO: 1998, SEQ ID NO: 2122 or SEQ ID NO: 2194;
(ii) an amino acid sequence having at least 50% sequence identity to the amino acid sequence of SEQ ID NO: 176, and comprising an amino acid sequence having at least 50% sequence identity to any one of the motifs 4 to 6 (SEQ ID NO: 6 to 8);
(iii) an amino acid sequence having at least 50% sequence identity to SEQ ID NO: 1998, SEQ ID NO: 2122, or SEQ ID NO: 2194; or
(iv) derivatives of any of the amino acid sequences of (i) or (iii) above.

The application's sequence listing, which the Patent Office published only in electronic form, follows.

SEQUENCE LISTING (2288 sequences)

SEQ ID NO: 1 - DNA, 1236 bp, Zea mays
atgaatgcattggcagcaaccagcaggaacttcaagcaggcagctaagctgctgggcctcgactccaagctggagaagaacttgctcattccattcagggagatcaaggttgaatgcacaatcccaaaagatgatggaactttggcatcctatgttggatttagggttcaacatgataatgctaggggacctatgaagggtggaatcagataccaccatgaggttgatcctgatgaagttaatgccttggcacaattgatgacttggaaaacagcagtagctaacataccatatggaagagccaaaggtggtattggatgtagccctggagacctgagcatctctgagcttgagaggcttacccgagtttttactcagaaaatccatgacttgattggcatccatactgacgttccagctccagatatgggcaccaactcacagacaatggcatggatacttgacgaatactcaaagttccatggttactcacctgctgttgtgacaggaaagcctgtggacctcggaggatcattgggaagagacgccgctactggaaggggagttctgtttgctactgaagctttgcttgcagagcatggcaaaggcattgcaggccagcgtttcgtcatacagggattcggtaacgttggttcctgggcagctcagctgataagtgaagccggtggcaaggtgattgctatcagtgacgtcacaggcgccgtcaaaaacgtcgatggcctcgacatcgcgcagctagtgaagcactcggcggagaacaaggggatcaagggcttcaaggggggagacgccatcgctccagactcgttgctcactgaagagtgcgacgtcctcatcccggcagcgcttgggggagtcataaacaaggataatgctaacgacataaaggcaaagtacatcatcgaggctgccaatcaccccacagatccagaggcagacgagatcctgtcaaagaaaggcgtcctcatcctccccgacatactggccaactctggtggcgtcacagtgggctacttcgagtgggtacaaaacatccaggggttcatgtgggacgaagagaaggtaaacgcggagctgcggacgtacatgacgcgcgccttcggggacgtgaagcagatgtgccggagccacagctgcgacctccgcatgggcgccttcacgcttggcgtcaaccgcatcgcgcgcgccaccgtcctcaggggatgggaagcatga

SEQ ID NO: 2 - protein, 411 aa, Zea mays
MNALAATSRNFKQAAKLLGLDSKLEKNLLIPFREIKVECTIPKDDGTLASYVGFRVQHDNARGPMKGGIRYHHEVDPDEVNALAQLMTWKTAVANIPYGRAKGGIGCSPGDLSISELERLTRVFTQKIHDLIGIHTDVPAPDMGTNSQTMAWILDEYSKFHGYSPAVVTGKPVDLGGSLGRDAATGRGVLFATEALLAEHGKGIAGQRFVIQGFGNVGSWAAQLISEAGGKVIAISDVTGAVKNVDGLDIAQLVKHSAENKGIKGFKGGDAIAPDSLLTEECDVLIPAALGGVINKDNANDIKAKYIIEAANHPTDPEADEILSKKGVLILPDILANSGGVTVGYFEWVQNIQGFMWDEEKVNAELRTYMTRAFGDVKQMCRSHSCDLRMGAFTLGVNRIARATVLRGWEA

SEQ ID NO: 3 - protein, 19 aa, Artificial sequence
  motif 1
  VARIANT (2)..(2): / replace = "Met"
  VARIANT (5)..(5): / replace = "Phe" / replace = "Leu"
  VARIANT (8)..(8): / replace = "Val"
  VARIANT (13)..(13): / replace = "Ser"
  VARIANT (14)..(14): / replace = "Leu"
  VARIANT (16)..(16): / replace = "Arg"
LLIPYREIKVECTIPKDDG

SEQ ID NO: 4 - protein, 15 aa, Artificial sequence
  motif 2
  VARIANT (13)..(13): / replace = "Ser"
EVNALAQLMTWKTAV

SEQ ID NO: 5 - protein, 34 aa, Artificial sequence
  motif 3
  VARIANT (8)..(8): / replace = "Gly"
  VARIANT (9)..(9): / replace = "Ser" / replace = "Pro"
  VARIANT (15)..(15): / replace = "Met"
  VARIANT (16)..(16): / replace = "Phe"
  VARIANT (25)..(25): / replace = "Tyr"
  VARIANT (26)..(26): / replace = "Ser"
  VARIANT (29)..(29): / replace = "Ile"
PAPDMGTNAQTMAWILDEYSKFHGHTPAVVTGKP

SEQ ID NO: 6 - protein, 12 aa, Artificial sequence
  motif 4
  VARIANT (3)..(3): / replace = "Ile"
  VARIANT (5)..(5): / replace = "Val" / replace = "Leu"
  VARIANT (7)..(7): / replace = "Cys"
CDVLIPAALGGV

SEQ ID NO: 7 - protein, 29 aa, Artificial sequence
  motif 5
  VARIANT (4)..(4): / replace = "Val"
  VARIANT (5)..(5): / replace = "Phe" / replace = "Leu"
  VARIANT (8)..(8): / replace = "Cys" / replace = "Ala"
  VARIANT (12)..(12): / replace = "Ile" / replace = "Val"
  VARIANT (14)..(14): / replace = "Gly"
LPDIYANSGGVTVSYFEWVQNIQGFMWDE

SEQ ID NO: 8 - protein, 3 aa, Artificial sequence
  motif 6
RGW

SEQ ID NO: 9 - protein, 22 aa, Artificial sequence
  motif 7
  VARIANT (2)..(2): / replace = "Lys"
  VARIANT (4)..(4): / replace = "Ser" / replace = "Val"
  VARIANT (6)..(6): / replace = "Ile" / replace = "Leu" / replace = "Met" / replace = "Glu"
  VARIANT (9)..(9): / replace = "Lys" / replace = "Ser" / replace = "Asn"
  VARIANT (11)..(11): / replace = "Val" / replace = "Gln" / replace = "Arg" / replace = "Lys"
  VARIANT (12)..(12): / replace = "Ala" / replace = "Lys" / replace = "Leu" / replace = "Ile" / replace = "Cys"
  VARIANT (13)..(13): / replace = "Cys" / replace = "Arg" / replace = "Gln"
  VARIANT (14)..(14): / replace = "Ile" / replace = "Phe"
  VARIANT (16)..(16): / replace = "Lys"
  VARIANT (18)..(18): / replace = "Trp" / replace = "Tyr"
  VARIANT (21)..(21): / replace = "Gln"
  VARIANT (22)..(22): / replace = "Trp"
FRVPWVDDRGETHVNRGFRVHF

SEQ ID NO: 10 - protein, 10 aa, Artificial sequence
  motif 8
  UNSURE (3)..(3): / replace = "Tyr" / replace = "Phe"
  UNSURE (4)..(4): / replace = "Lys"
  UNSURE (7)..(7): / replace = "Leu" / replace = "Met"
  UNSURE (9)..(9): / replace = "Leu"
  UNSURE (10)..(10): / replace = "Arg"
GPCRGGIRFH

SEQ ID NO: 11 - protein, 12 aa, Artificial sequence
  motif 9
  VARIANT (3)..(3): / replace = "Ala"
  VARIANT (6)..(6): / replace = "Asn" / replace = "Glu"
  VARIANT (10)..(10): / replace = "Arg"
  VARIANT (11)..(11): / replace = "Ser"
  VARIANT (12)..(12): / replace = "Glu"
GGSDFDPKGKTD

SEQ ID NO: 12 - protein, 16 aa, Artificial sequence
  motif 10
  misc_feature (3)..(3): Xaa can be any naturally occurring amino acid
  VARIANT (4)..(4): / replace = "Lys"
  VARIANT (6)..(6): / replace = "Ile" / replace = "Leu"
  VARIANT (9)..(9): / replace = "Met"
  VARIANT (10)..(10): / replace = "Phe" / replace = "Tyr"
  VARIANT (13)..(13): / replace = "Trp"
  VARIANT (14)..(14): / replace = "Lys"
  VARIANT (16)..(16): / replace = "Ile"
VGXREMGYLLGQYRRL

SEQ ID NO: 13 - protein, 10 aa, Artificial sequence
  motif 11
  VARIANT (2)..(2): / replace = "Gly" / replace = "Ser"
  VARIANT (3)..(3): / replace = "Met" / replace = "Lys"
  VARIANT (5)..(5): / replace = "Thr" / replace = "Val" / replace = "Ser"
  VARIANT (6)..(6): / replace = "Ala" / replace = "Asn"
PAIAAGAGGV

SEQ ID NO: 14 - protein, 16 aa, Artificial sequence
  motif 14
  VARIANT (3)..(3): / replace = "Ala"
  VARIANT (6)..(6): / replace = "Asp" / replace = "Ser"
  VARIANT (7)..(7): / replace = "His"
  VARIANT (8)..(8): / replace = "Val" / replace = "Ser" / replace = "His"
  VARIANT (9)..(9): / replace = "Arg"
  VARIANT (10)..(10): / replace = "Leu" / replace = "Met"
  VARIANT (12)..(12): / replace = "Tyr" / replace = "Val"
  VARIANT (16)..(16): / replace = "Leu"
YRVQHNNALGPFKGGI

SEQ ID NO: 15 - protein, 8 aa, Artificial sequence
  motif 13
  VARIANT (3)..(3): / replace = "Ala"
  VARIANT (5)..(5): / replace = "Met"
  VARIANT (7)..(7): / replace = "Phe"
LASLNTWK

SEQ ID NO: 16 - protein, 8 aa, Artificial sequence
  motif 14
  VARIANT (1)..(1): / replace = "Tyr"
  VARIANT (4)..(4): / replace = "Ser"
  VARIANT (8)..(8): / replace = "Ile"
FGGAKGGV

SEQ ID NO: 17 - protein, 21 aa, Artificial sequence
  motif 15
  VARIANT (6)..(6): / replace = "Val" / replace = "Leu"
  VARIANT (7)..(7): / replace = "Tyr" / replace = "Glu"
  VARIANT (8)..(8): / replace = "Glu"
  VARIANT (9)..(9): / replace = "Gly"
  VARIANT (11)..(11): / replace = "Ser"
  VARIANT (12)..(12): / replace = "Leu" / replace = "Asp" / replace = "His"
  VARIANT (15)..(15): / replace = "Glu" / replace = "Thr" / replace = "Gln"
  VARIANT (16)..(16): / replace = "Ser" / replace = "Ala" / replace = "Glu"
  VARIANT (18)..(18): / replace = "Thr"
  VARIANT (20)..(20): / replace = "Leu"
VTGKPTWLHGIVGRDKAGGRG

SEQ ID NO: 18 - protein, 10 aa, Artificial sequence
  motif 16
  VARIANT (2)..(2): / replace = "Cys"
  VARIANT (5)..(5): / replace = "Leu"
  VARIANT (8)..(8): / replace = "Ala"
  VARIANT (10)..(10): / replace = "Ile" / replace = "Leu"
PADVFIPCAV

SEQ ID NO: 19 - protein, 9 aa, Artificial sequence
  motif 17
  VARIANT (5)..(5): / replace = "Ser"
  VARIANT (6)..(6): / replace = "Pro"
  VARIANT (7)..(7): / replace = "Thr" / replace = "Val"
EAANGALTP

SEQ ID NO: 20 - protein, 21 aa, Artificial sequence
  motif 18
  VARIANT (4)..(4): / replace = "Ile"
  VARIANT (5)..(5): / replace = "Tyr" / replace = "Leu"
  VARIANT (6)..(6): / replace = "Thr" / replace = "Cys" / replace = "Leu"
  VARIANT (8)..(8): / replace = "Ala"
  VARIANT (10)..(10): / replace = "Gly"
  VARIANT (12)..(12): / replace = "Ile" / replace = "Thr"
  VARIANT (15)..(15): / replace = "Tyr"
  VARIANT (19)..(19): / replace = "Leu"
  VARIANT (20)..(20): / replace = "Lys"
LPDLIANGGAVVVSFFEWVQN

SEQ ID NO: 21 - protein, 11 aa, Artificial sequence
  motif 19
  VARIANT (5)..(5): / replace = "Val"
  VARIANT (8)..(8): / replace = "Ser"
  VARIANT (10)..(10): / replace = "Ser"
MNALAATNRNF

SEQ ID NO: 22 - protein, 28 aa, Artificial sequence
  motif 20
  VARIANT (8)..(8): / replace = "Arg"
RIFCTVCKEYGRKHRRNPYGNEGSRNMQ

SEQ ID NO: 23 - DNA, 2194 bp, Oryza sativa
aatccgaaaagtttctgcaccgttttcaccccctaactaacaatatagggaacgtgtgctaaatataaaatgagaccttatatatgtagcgctgataactagaactatgcaagaaaaactcatccacctactttagtggcaatcgggctaaataaaaaagagtcgctacactagtttcgttttccttagtaattaagtgggaaaatgaaatcattattgcttagaatatacgttcacatctctgtcatgaagttaaattattcgaggtagccataattgtcatcaaactcttcttgaataaaaaaatctttctagctgaactcaatgggtaaagagagagattttttttaaaaaaatagaatgaagatattctgaacgtattggcaaagatttaaacatataattatataattttatagtttgtgcattcgtcatatcgcacatcattaaggacatgtcttactccatcccaatttttatttagtaattaaagacaattgacttatttttattatttatcttttttcgattagatgcaaggtacttacgcacacactttgtgctcatgtgcatgtgtgagtgcacctcctcaatacacgttcaactagcaacacatctctaatatcactcgcctatttaatacatttaggtagcaatatctgaattcaagcactccaccatcaccagaccacttttaataatatctaaaatacaaaaaataattttacagaatagcatgaaaagtatgaaacgaactatttaggtttttcacatacaaaaaaaaaaagaattttgctcgtgcgcgagcgccaatctcccatattgggcacacaggcaacaacagagtggctgcccacagaacaacccacaaaaaacgatgatctaacggaggacagcaagtccgcaacaaccttttaacagcaggctttgcggccaggagagaggaggagaggcaaagaaaaccaagcatcctccttctcccatctataaattcctccccccttttcccctctctatataggaggcatccaagccaagaagagggagagcaccaaggacacgcgactagcagaagccgagcgaccgccttctcgatccatatcttccggtcgagttcttggtcgatctcttccctcctccacctcctcctcacagggtatgtgcctcccttcggttgttcttggatttattgttctaggttgtgtagtacgggcgttgatgttaggaaaggggatctgtatctgtgatgattcctgttcttggatttgggatagaggggttcttgatgttgcatgttatcggttcggtttgattagtagtatggttttcaatcgtctggagagctctatggaaatgaaatggtttagggatcggaatcttgcgattttgtgagtaccttttgtttgaggtaaaatcagagcaccggtgattttgcttggtgtaataaagtacggttgtttggtcctcgattctggtagtgatgcttctcgatttgacgaagctatcctttgtttattccctattgaacaaaaataatccaactttgaagacggtcccgttgatgagattgaatgattgattcttaagcctgtccaaaatttcgcagctggcttgtttagatacagtagtccccatcacgaaattcatggaaacagttataatcctcaggaacaggggattccctgttcttccgatttgctttagtcccagaattttttttcccaaatatcttaaaaagtcactttctggttcagttcaatgaattgattgctacaaataatgcttttatagcgttatcctagctgtagttcagttaataggtaatacccctatagtttagtcaggagaagaacttatccgatttctgatctccatttttaattatatgaaatgaactgtagcataagcagtattcatttggattattttttttattagctctcaccccttcattattctgagctgaaagtctggcatgaactgtcctcaattttgttttcaaattcacatcgattatctatgcattatcctcttgtatctacctgtagaagtttctttttggttattccttgactgcttgattacagaaagaaatttatgaagctgtaatcgggatagttatactgcttgttcttatgattcatttcctttgtgcagttcttggtgtagcttgccactttcaccagcaaagttc

SEQ ID NO: 24 - DNA, 1264 bp, Oryza sativa
tcgacgctactcaagtggtgggaggccaccgcatgttccaacgaagcgccaaagaaagccttgcagactctaatgctattagtcgcctaggatatttggaatgaaaggaaccgcagagtttttcagcaccaagagcttccggtggctagtctgatagccaaaattaaggaggatgccaaaacatgggtcttggcgggcgcgaaacaccttgataggtggcttaccttttaacatgttcgggccaaaggccttgagacggtaaagttttctatttgcgcttgcgcatgtacaattttattcctctattcaatgaaattggtggctcactggttcattaaaaaaaaaagaatctagcctgttcgggaagaagaggattttgttcgtgagagagagagagagagagagagagagagagagagagaaggaggaggaggattttcaggcttcgcattgcccaacctctgcttctgttggcccaagaagaatcccaggcgcccatgggctggcagtttaccacggacctacctagcctaccttagctatctaagcgggccgacctagtagccacgtgcctagtgtagattaaagttgccgggccagcaggaagccacgctgcaatggcatcttcccctgtccttcgcgtacgtgaaaacaaacccaggtaagcttagaatcttcttgcccgttggactgggacacccaccaatcccaccatgccccgatattcctccggtctcggttcatgtgatgtcctctcttgtgtgatcacggagcaagcattcttaaacggcaaaagaaaatcaccaacttgctcacgcagtcacgctgcaccgcgcgaagcgacgcccgataggccaagatcgcgagataaaataacaaccaatgatcataaggaaacaagcccgcgatgtgtcgtgtgcagcaatcttggtcatttgcgggatcgagtgcttcacagctaaccaaatattcggccgatgatttaacacattatcagcgtagatgtacgtacgatttgttaattaatctacgagccttgctagggcaggtgttctgccagccaatccagatcgccctcgtatgcacgctcacatgatggcagggcagggttcacatgagctctaacggtcgattaattaatcccggggctcgactataaatacctccctaatcccatgatcaaaaccatctcaagcagcctaatcatctccagctgatcaagagctcttaattagctagctagtgattagctgcgcttgtgatc

SEQ ID NO: 25 - DNA, 51 bp, Artificial sequence
  primer: prm07063
ggggacaagtttgtacaaaaaagcaggcttaaacaatgaacgcgctagccg

SEQ ID NO: 26 - DNA, 50 bp, Artificial sequence
  primer: prm07064
ggggaccactttgtacaagaaagctgggtcctcaacagattctcatgcct

SEQ ID NO: 27 - DNA, 53 bp, Artificial sequence
  primer: prm07065
ggggacaagtttgtacaaaaaagcaggcttaaacaatgaatgcattggcagca

SEQ ID NO: 28 - DNA, 48 bp, Artificial sequence
  primer: prm07066
ggggaccactttgtacaagaaagctgggtggaggtcatgcttcccatc

SEQ ID NO: 29 - DNA, 1634 bp, Arabidopsis thaliana
aatactcaattctttcttcttcaattcatcacaacaaatcaaaaactccaagttcttacctttttcccatttacaatcggtaaatttctccgatcacgagatacaaatttcactttctgatatcttggatcttccgatcactttgaattttttggtttgttgattttttttttttttttgttccataaagttcgaattttttatagagaagaaaccatgaatgctttagctgcaacaaacagaaacttccgtcatgcatctcgaatcctgggtttggattcgaagatcgagagaagtcttatgatcccatttagagaaatcaaggttgagtgtacgattcctaaagacgatggcactctggtttcatacatcggatttagggttcaacatgacaatgctcgtggacccatgaaaggtggaatcagatatcatcctgaggttgatccagatgaagttaacgcactagctcagctgatgacttggaagactgctgtagcagatattccatatggtggtgctaaaggtggaattggatgtagtcctcgtgacttgagtttgagcgagcttgagaggttgactcgtgtgtttacacagaagattcatgatcttatcggtattcataccgatgtgcctgctcctgatatgggcactaacgctcaaaccatggcttggattcttgatgagtactccaagtttcatggtcattcccctgctgttgtcactggaaagcccattgatcttggtggttcattaggtagggaagctgccacaggtcgtggtgtagtatttgccaccgaagctcttcttgctgagtacgggaaatcgattcagggtttgacatttgttattcaaggttttgggaatgttggaacatgggctgcgaagctgatccacgagaaaggcggtaaagtggttgcagtaagcgacattactggtgcaatcaggaaccctgaaggtatcgacatcaacgctctcataaaacacaaggacgcaactggaagtctcaatgatttcaatggtggagacgctatgaattcagatgaattgctcattcatgagtgtgatgttctcattccatgcgctcttggtggtgtcctgaacaaggaaaatgctggagatgtgaaggcaaagtttatagtagaggcagctaaccatccaacagatccagatgctgatgagattctgtcgaagaaaggagtgattatacttccagatatctacgcaaacgcaggaggagtgacagtgagttacttcgagtgggtgcagaacattcaaggattcatgtgggaagaggaaaaagtgaacttggagctgcaaaaatacatgactcgagcctttcacaacatcaagacaatgtgccatactcattcttgcaacctccgtatgggagctttcactcttggagttaaccgagtcgctcgagccacccagttgcgtggttgggaagcttaattcagttgaatcccccttatatactctgtttcttgcttgctctgttttccatttttttttttttggtttcattgttactgaaaatcattgagctttccgaaatggaaaaggaaacaaatggattgaataaaaactaacaaattggaataaaatatatgattggattaaacgagagtttcaaa

SEQ ID NO: 30 - DNA, 1474 bp, Brassica napus
atcatctcatctcattaaccctattcacaaacccttctttcgatttcgttttgtgttgttaaagtttggatctttctttccttccgatcacattttgatttgattttgagccatgaatgctttagccgcaacgaacaggaacttccgtcatgcctcacgaatcctcggtttggattccaagatcgagaagagtctcatgatcccattcagagaaatcaaggtggagtgcacgatccccaaagacgacggaacgcttgtctcctacgttggattcagggttcaacacgacaatgctcgtggacccatgaaaggaggaatcagataccaccccgaggttgatcccgatgaagtcaacgcattggctcagctcatgacttggaagacagctgtcgctgacattccgtacggtggagctaaaggtgggatcggatgcaaccctcgtgacttgagcttgagcgagctcgagagacttacacatgtcttcactcagaagatccatgatctcatcggtattcacaccgatgtccctgctcctgacatgggtactaatgctcagacaatggcttggattcttgatgagtactccaagtttcatggtcattcccctgctgttgtcaccggcaagcccattgatcttggtggttcacttggtagggaagctgccacaggacgtggtgtagtctatgcaaccgaagctctccttgctgaatacggcaaatcgattaagggattgacatttgttgttcagggttttgggaatgttggaacatgggcagccaagctgatccatgagaaaggtgggaaagtggttgcagtaagcgacatcacaggtgctgtcagaaaccctgaaggtctagacatcgacgctcttctgagtcacaaagaagcaactggaagtctagttgatttcagtggtggagacgctatggactcaaacgaactgcttatccatgagtgtgatgttctcattccttgtgctcttggtggtgtcctgaacaaggaaaatgctggagatgtgaaggcaaagttcataatagaggctgcaaaccatccaacagatccagatgctgatgagattctgtcgaagaaaggagtgattatactaccagatatatacgcaaacgcaggaggagtgacggtgagttactttgagtgggtccagaacattcaagggttcatgtgggaagaggaaaaagtgaacctggagctgcagaagtacatgactcgtgcctttcacaacatcaagtcaatgtgccatactcattcctgtaacctccgtatgggagctttcactcttggagttaaccgtgtcgctagagccacccagttgcgtggttgggaagcttaatgaaaattttcccccatatactctgtttttttcctctgttttcccctgttttttcctctgttttcccctgtttttttgtgtttaattgttactcaaaatcattcaaatgaattgaataactaaccg

SEQ ID NO: 31 - DNA, 1492 bp, Centaurea solstitialis
  misc_feature (1424)..(1424): n is a, c, g, or t
cggggatatctccgttttttttctggaatcatcttcgaaaaacagcattactccttttactgtgatccataattttgtatcagtattctcggattatcgatcatcatgaatgctctggctgcaacaaatcggaactttcgtaatgctgctcgtctgcttggacttgattctagactcgagaggagtttgttgattccgtttagagaaatcaaggttgagtgtacgatcccgagggatgacggaactttgacgtcgtatgttggattcagagtgcaacatgataattctcgtggtccgatgaagggcggaatcagatatcatcctgaggttgatcctgacgaggtgaacgcattggctcaactaatgacctggaagactgcggtggccaacattccttatggtggcgcaaagggtgggattgggtgcacaccaaaggacttgactcttagtgagcttgaacgtcttactcgtgtcttcacacaaaagatacatgatgttattggaatcaggactgatataccagcaccagatatgggcaccaacgcacagactatggcttggattttagatgagtactcaaaattccatggttactcgccggccattgtcactggaaagccaatagatcttggtggatcgttagggagagaggctgcaactggccgtggtgttgtttttgccactgaagccttacttgctgaacatggcaaatctatcaaagatatgacttttgctattcagggttttgggaacgtgggatcttgggcagctaggctgattcacgaaaagggtggtaagattgttgcagtgagtgatgtcactggagccgtgaagaacccaaatggtattgatatactagcattgctcaagcataaagaaacaactcggagcttaagtgaattcaatggaggagactccatgaatgcagatgaattactagttcatgaatgtgatgtactcataccatgtgccctaggtggtgttctcaacagagaaaatgcaggagatgtaaaagctaagttcatcgtagaagctgctaatcatcctaccgatcctgaagcagacgagattctgacgaagaaaggagtgacaatccttcctgatatatacgcaaatgctggaggtgtgaccgttagctacttcgagtgggtccagaatactcaaggatttatgtgggatgaagaaaaggtgaacagtgaacttaaaaaatatatgacaagagctttccatgacataaagggcatgtgtcaaacccacgagtgcaaccttcgtatgggagcgttcacgttgggagtcgatcgagttgcacgctgtactattttaagaggatgggaggcttgattaggtgctttataggatataccattcattcttacaaacaattaaaacctaactcactcttgatagctttgttttcatctacnaatttacaacataaacagatttgaaaccattgatggaataatgccatttggtgatattttttgggtgc

SEQ ID NO: 32 - DNA, 1684 bp, Gossypium hirsutum
ctttcttcaattaataaccaatcaaagtgctctctttgcttttccctgttttataagtcatcgaactgttgtttttcttgatctctccttcattcccgtttctggtttttttttcttttttttgagtttttagtaggtagccatgaatgctcttgctgcaaccaaccgcaatttccgactagcgtctcgtttacttgggttagactctaagcttgaaaaaagtcttctgatcccttttagagaaatcaaggtggagtgcacgattcccaaggacgatggaaccttggcgacttacgttggatttaggatccaacatgataatgctcgtggcccaatgaaaggtggaatcaaatatcatcctgaggacgagcccgatgaagtaaatgctctggctcaactaatgacatggaagacggctgtagcagccattccttacggcggtgcaaaaggtggcattggatgcaatcctacggatttaagtaagagtgaattggaacgtctaactcgcgtcttcactcagaagatccatgatcttatcggtatacatacagatgttcctgcaccagatatggggactaatgcacagaccatggcatggattctggatgaatactctaagttccatggacactcaccagctgttgtcacaggaaagccaatagatctaggtggatcactaggcagggaggctgcaactggccgtggtgttgtatatgcaactgaagcgttacttgctgaatatgagaagtcaattaagggaatgacctttgttatccagggttttggtaatgttgggtcttgggcatcaaggctcatacatgagaagggtggtaaggttattgcagtgagtgacataactggcgctcttaagaacccaaacggaattgatataccagaactgctaaagcataaagaagctactggaagtttgaaaagcttcaatggtggagattccatggatccaaatgaactgcttgtacatgaatgtgacgttctcatcccgtgtgccttaggtggagtccttaacagggaaaatgctgcagatgtgaaggcaaagtttataatagaggcagcaaaccatcctacagatccagaagcagatgagattctatcaaagaaaggagtaataatactacccgatatatatgcaaatgcaggaggggtgactgtcagctactttgagtgggttcagaacatccaaggtttcatgtgggatgaggagaaagtgaaccaggagctgaagaaatacatgactaaagcttttcataacatcaagaacatgtgccagtcgcacgactgcaatctccggatgggtgcatttacacttggggtgaaccgtgttgcccgtgcaactatcctgagaggatgggaagcataaacgcctcccttccggcttttatttctcttagtttatagtctccattgaaaagcacaagcaataactttcaagaattcttagcttacccctccaaagctttttttaactttttatggttctcccatttatccttatatttattaggggggatacctgtaccagctttgtatttggaatagtcccattcaatgtgttcatattctttcaactttggggttgaattattattattattttccatgcattgtaagttccgtttcgtttcagtgacgtgttcatattatcaaattaaatacaatttacttt

SEQ ID NO: 33 - DNA, 1490 bp, Glycine max
accaggtttcattgacgcattactattactctctctgagtcattcactcactcctctctcttctctgtttcattgcttcttgttgtcaactatgaacgctcttgcagccaccaaccgcaactttcaacgtgcagctcgcattcttggtttggattccaagcttgagaagagcctcctcatacccttcagagaagtcaaagttgaatgcacgattccaaaggatgatggaactctggtttcctatgtgggattcaggatccaacatgataatgctcgtggtcctatgaagggagggattcgttatcatcccgaggttgaccctgatgaagtgaatgctctagctcagctgatgacctggaagactgctgtagcagacattccctatggaggagcaaagggtgggattggctgcaacccaagggatctgagtatcagtgagttagaacgtctaactcgggttttcacccaaaagattcatgatctcattggcattcaaaaggatgttcccgcccctgatatgggaactaatgctcagaccatggcatggattcttgatgaatattcaaagtttcatgggcattcacctgcagttgtgacagggaagcctattgatcttggaggttcgttggggagggaggctgcaacaggtctcggagtggtttttgcaactgaggctttatttgctgaatatgggaagtcaatttcggatcacacatttgtcatccagggctttggaaatgtgggcacgtgggctgctaagtctatttttgagagggggggaaaggtgattgctgtgagtgacatcagtggtgctatcaaaaacctaaatggaatcgacatccttgcccttctgaaacacaaggatggcaatggtggagtcttgaaggacttcccaggtgcagaagccatggatccagatgaattgcttgttcatgaatgcgatgttcttgtcccttgtgccttgggtggagttctaaacaaggaaaatgctgctgatgtgaaggcaaaatttataatagaagcagcaaatcaccccactgaccctgatgcggatgggatcttgtctaagaaaggagtcattatattacctgatatttatgccaatgctggcggagtgactgtgagctactttgaatgggttcagaatattcaaggtttcatgtgggatgaagagaaagtgaaccgtgagctgaagaagtacatgaccaaagctgtccaggatatcaaggcaatgtgtaaaattcacaactgtgacctgcgaatgggggcattcactctaggagtgaaccgtgttgcccgtgctaccctattgaggggttgggaagcataggtttactacatgagaagtaggattttacaaggttgtgtttttctttctttattgtcttagtgttagtcaaacaataacaatattagtcatgtgagacttgccaataaaacattattcttgccattgggtcctgcgaatggaagttactaccatatttgtt

SEQ ID NO: 34 - DNA, 1746 bp, Gossypium raimondii
cgcctcctaacagtcgcttgttcccactttcttttttctttcttcattttactctctcttaaaggaacttcccgaagtatatgatatgccccttctcttcctttaaagaaacgttcttttttagcacccaagaaaaaaaaaagtctcttctttcattgatcaacttgtttctcttacagttccttgttttatgcttcatactgttgtttctcttcatctttcgatcagtcccacttctgggtatttctcgttttgaggttttaattggtagccatgaatgctcttgctggaactagccgcaatttccgcctggcctctcgcctacttggcttggactctaagcttgaaaagtctcttctgatcccatttagagagatcaaggtggagtgcacaattcccaaggacgatggaaccttggtgtcctacgttggattcagaatacagcatgataatgctcgtggtcccatgaaaggaggaatcagatatcatcctgaggttgaccctgatgaagtaaatgcacttgctcaactaatgacctggaagactgctgtagcagacattccatatggtggtgcaaaaggtggaataggatgctctcctagggacttaagtaagagtgaattggaacgtctaactcgcgtcttcactcaaaagatccatgatctcattggtatacatacagatgttcctgccccagacatgggaactaatgcacagacaatggcatggattttggatgagtattctaagtttcatggacactccccggctgttgttacaggaaagccgatagatctaggcggatcgctaggcagggaagctgcaacaggtcgaggtgttgtatatgcaactgaagctttacttgctgaatattggaaggcagttaagggtttgaccttcattatccagggtttcggtaatgttgggtcttgggtagcaaggctcatacatgagaggggtggtaaggttattgcggtgagtgacgtcactggtgctgttaagaatcaaaatggaattgatatacctcagctgctaaagcataaagaaactactggaagtttgacaggcttcagtggcggagattccctggatccaagtgaactgctggtacacgaatgcgatgttcttgtcccatgtgctttaggtggagtgctgaacagggaaaacgctgcacatgtgaaggcaaagttcataatagaggctgcaaaccatcccactgacccggaagcagatgagattctatcaaagaaaggagtaataatactgccagacatatatgcaaatgcaggaggggtgactgtcagctactttgagtgggttcagaacattcaaggtttcatgtgggatgaagacaaagtgaacaaggagctgaagaggtacatgactcaagctttccacaacatcaaaaccatgtgccagacacaccattgcaatctccggatgggtgcctttacactcggtgttaaccgtgttgctcgtgcaactctcctccgaggctgggaagcataacaaagggctctctttccctcttatgatttctaatctccatcggaaaagcttaaagcatttgagcttttgaagctcttagctagtaattgttctcccattttatccttcacgaaattttatcaaacttcatttctatttatggggggtattgttaactttcaaattgtcccagctttgtgttggaacaatgcattttgaatcccataataaacccaaaaacttgtgtaatcacccttt

SEQ ID NO: 35 - DNA, 1748 bp, Gossypium raimondii
ttctcattctttcttcaattaataaccaatcaatgtgctctctttgctttttcctgttttataagtcatcgaactgttgtttttcttgatctctccatcattcccgtttctgggtttttttgtttcttttttttttttttgagtttttagtaggtagccatgaatgctcttgctgcaaccaaccgcaatttccgactggcgtctcgtttacttgggttagactctaagcttgaaaagagtcttctgatcccttttagagaaatcaaggtggagtgcacgattcctaaggacgatggaaccttggcgacttacgttggatttaggatccaacatgataatgctcgtggcccaatgaaaggtggaatcagatatcatcctgaggtcgagcccgatgaagtaaatgccctggctcaactaatgacatggaagacggctgtagcagacattccttacggcggtgcaaaaggtggcattggatgcaatcctagggatttaagtaagagtgaattggaacgtctaactcgcgtcttcactcaaaagatccatgatcttatcggtatacatacagatgttcctgcaccagacatggggactaatgcacagaccatggcatggattctggatgaatactctaagttccatggacactcaccagctgttgtcacaggaaagcctatagatctaggtggatcactaggcagggaggctgcaactggccgtggtgttgtatatgcaactgaagctttacttgctgaatatgggaagtcaattaagggaatgacctttggtatccagggttttggtaatgttgggtcttgggcatcaaggctcatacatgagaagggtggtaaggttattgctgtgagtgacataactggcgctcttaagaacccaaacggaattgatataccagaactgctaaagcataaagaagctactggaagtttgaaaagcttcaatggtggagattccatggatccaaatgaactgcttgtacatgaatgtgatgttctcatcccgtgtgccttaggtggagtccttaacagggaaaatgctgcagatgtgaaggcaaagtttataatagaggcagcaaaccatcctacagatccagaagcagatgagattctatcaaagaaaggagtaataatactaccagatatatatgcaaatgcaggaggggtgactgtcagctactttgagtgggttcagaacattcaaggtttcatgtgggatgaagagaaagtgaaccaggagctgaagaaatacatgactaaagcttttcataacatcaagaacatgtgccagtcgcacgactgcaatctccggatgggtgcatttacacttggggtgaaccgtgttgcccgtgcaactatcctgagaggatgggaagcataaacgcctcccttccggcttttatttctcttagtttatagtctccattgaaaagcacaagcaataactttcaagaattcttagcttacccctccaaagctttttttaactttttatggttctcccatttatccttgaagaaactttatacaaacttcaaatttatacttatatttattaggggggatacctgtaccagctttgtatttggagtagtcccattcaatgtgctcaatattctttcaactttggggttgaattattattattattttccatgcaattgtaagttccgtttcgtttcaagtgacgtgttcatattatcaaattaaatacaattttggtttccccttgtt

SEQ ID NO: 36 - DNA, 1770 bp, Hordeum vulgare
gtttgcgtcgccctcgatccccggacaaaaatccccccttttttacccctgccttgccgtttctggtcgcgagagcctcgccaccaccaccaccccgaccccgggtccgatctccctcgcggtctgtccctttcgcccctgcttcctatttccttgcggttgcggaggttgttggagcggggggaaggaggaaaagaaacaagcgccgcgccgccgccgcagccatgaacgcgctcgccgcgaccagccgcaacttccgccaggccgcgcggctgctcggcctcgactccaagctcgagaagagcctcctcatccccttccgcgagatcaaggtcgaatgcaccatccccaaggacgacggcacgctggcctccttcgtgggcttccgcgtgcagcatgacaatgcccgcgggcccatgaaaggtggcatccgctaccaccccgaggttgatccagatgaagtaaatgcacttgctcaactgatgacatggaagactgctgttgcggcggtaccatatggtggagcaaaggggggaataggctgctctcctggtgatttaagcaggagtgagttggagcgtctgacgcgtgtatttactcagaaaattcatgaccttatcggaacccataccgatattccagctccagacatgggaactaattcacagaccatggcatggatctttgacgagtactcaaaattccatggtcactccccagctgttgtcacagggaagcccatagatcttggtggatcattaggtagggatgctgccactgggcggggtgtaatgtatgctactgaggctctcctggctgaatacggaaagtctatttctggatcaacctttgttattcagggattcggtaatgttggttcatgggctgcacaactcatccatgagaaaggtggtaaggtaattgcacttggagatgtatcaggcacaatcagaaacaaagcagggatagacgtacctgctctgatgaagcacagaaatgagggtggtcagttgaaagactttcatggtgcggaagtcatggattcctcagagttgctggtgcatgaatgcgatgtcctcctcccatgcgccttaggtggagttcttaacaaagataatgcacctgatgtgaaggccaaatttataattgaagctgctaatcatccaactgatccagaagctgatgagatccttaccaagaagggggtggtcgtgttacctgatatctatgctaatgctggtggtgtgatcgttagttattttgagtgggttcagaacattcaaggcttcatgtgggaagaagaaaaggtgaacatggagctccacaagtatatgaacagcgcattccagcacatcaaggccatgtgcaagtctcaagattgcagccttaggatgggagcattcaccttgggagtgaaccgggttgcacgcgccaccatcttgaggggctgggaggcatgatgagttccatattcctcatccaataatccatgtcccaacaccgtggtggatgacagttcttatatccaccatcattggtttggtaaattcatcataagttgccggcatgggaggagtccagttgaaataattttcggtgtacatgacagatgatgggtttggtctttatgttagctaattatctgccctgggttgccaagtatggcgatccagttctgtgtgattgtaaaccttcagagttgttgaatgtttaccaaatgtttctgtgatttaatatcaaaagggttattttggcctcattggtttcaat

SEQ ID NO: 37 - DNA, 1236 bp, Medicago truncatula
atgaatgctcttgttgccaccaaccgtaatttccaacgtgcatctcgaatccttggtttggattccaaacttgagaaaagccttctcattccttacagagaaatcaaggtcgaatgtacgatcccaaaagatgatggaagtttggtttcatacgtcggttttcggatccaacatgacaatgcacgtggtcctatgaaaggaggaattcgttatcaccccgaggttgaccctgatgaagttaatgctcttgctcagctaatgacatggaagacagctgtggtagacattccatacggaggagcaaagggcggaattggctgcaacccaaaggatctgagcatcagtgagctagaacgtctcactcgtgttttcacccaaaagattcatgacctcattggcattcatagggatgttcctgcccctgatatgggaactaattcacagacaatggcttggattcttgatgaatattcaaagtttcatggtcattcaccagcagttgtgactggcaagcctattgatcttggaggttcattgggaagagaggctgcaacaggactgggagtggtttttgcaacagaggctttatttgctgaatatgggaagtcgatttctgatatgacatttgccatccaggggtttggcaatgtgggcacctgggctgcaaaggcaatttttgagagaggtggtaaggtggttgcagtgagtgacatcaatggtgctattagtaatccaaatgggattgatattgctgctcttctgaaacacaaggcaggcaacggaagtttgaaggatttctcaggaggagatgctatgaatccaaatgatttgcttgtccatgactgtgatgttctcattccatgtgctttgggaggtgttctcaacaaggaaaatgctaatgatgtgaaagcaaaatttattatagaggctgcaaatcatccaactgaccctgatgctgatgagatactgtctaagaaaggagtaattatattaccagacgtttatgccaatgctggtggagtgacagtaagctactttgaatgggttcagaatattcaaggatttatgtgggatgaagagaaagtgaaccaggagctgaaaaggtacatgaccaaagctttcaatgacataaaagcaaactgtaaaactcacaattgcgacttgcgaatgggagctttcactcttggactcaaccgtgtcgctcgcgctacacttttgagaggttgggaagcttag

SEQ ID NO: 38 - DNA, 2101 bp, Oryza sativa
cgttcgaaatttacaatctttgacccgcttcgtcctcaatcttcttgcttatacacagtcataatccctcgtactagaaattaccgtgcaaaatttccccacacacgtgctgctatggttctaaatttctaatcggctctgatgagtcaccttcccaacagatgagagaggattttctggctgagtttagcaattagcacagctctttgatcctatctttgctttcttgctccgcctacctggatggatggatcccccctccctattaatacagcacgcttcttcctcttcctcctcacgattcaagccaaacgcagccggccgacctcctcccgtgccttcctcctcgatccccggagagagaaaaaaggctccatcttttttcctctttccgtttttgggcgcgaacgcctcgtcccccccggatcgatcttgctcgcgcgcggtccgtagtcgcgtgctctgttcgaaaggcgagtccctttttttttttcttctccggccgcgggcgctaattttcttggagggcgacgcgccacctttggcccggccatgaacgcgctcgccgccaccagccgtaacttccggcaggccgccaggctgctcggcctcgactccaagctcgagaagagcctcctgatcccgttccgcgagatcaaggtggaatgcaccatccccaaagacgatggaaccttggcgtccttcattgggttccgcgtgcagcacgacaatgcccgcgggccaatgaaaggtggcattcgctatcaccctgaggttgatccagatgaagtaaatgcacttgctcaactaatgacatggaagactgctgttgcagcaattccatatggtggagcaaagggtgggattggatgcgctcctggtgaattaagcacgagtgagctggagcgtttgacacgtgtatttacacagaaaattcatgatcttattggagctcatactgacgtgccagctcctgacatgggaactaattcacagaccatggcttggattttggatgagtactcgaaattccatggtcattcaccggcagttgtcactgggaagccaatagtaagtcttggtggatcattaggtagagatgctgctacaggaagaggtgtgatgtacgctactgaggctcttttggctgaacatggaaagtccatttctggatcaacctttgttatccagggttttggtaatgttggttcatgggctgcacgaatcatccatgagaagggtggcaaggtgattgcacttggagatgtgacaggctcaatcagaaacaagaatgggttagacatacctgctctgatgaagcacagaaatgagggtggtgctttgaaagattttcatgatgcggaagtcatggattcttcagagctactagtgcatgaatgcgatgttctcatcccatgcgctttaggtggagtgctcaacagggaaaatgcacctgatgtgaaggccaaatttataattgaagctgctaatcatccaactgatccagaagctgacgagattcttgccaagaagggagtgaccatattacctgacatttacgccaactccggtggtgtgatcgttagctattttgagtgggttcagaacattcaagggttcatgtgggatgaggagaaggtgaacatggagctccacaagtacatgaacaattctttccagcacatcaaggccatgtgtaaatctcatgattgcaacctgaggatgggggcgttcaccctgggagtcaaccgggttgcacgtgccaccctcttgaggggatgggaggcatgaggccattaacaacactcatatccatgtccgaaaatgttggacgaccaatgtctgatctgataaattcatcagaagtggccggcttggaaggagctcacttgcaataatattcaagatagatcggcgtcggcgtccttccaccgttccggcgaaaaataataataaatatattaagggtacctaacaaaaatgtgatgtttcttctttcgtttttacaaaaggccgattcaatcgtgcgtgattatagtattgacaaaaaatggtgtaagctctagaggcaatttgaatttcacaaaggttgtattctgtc

SEQ ID NO: 39 - DNA, 1957 bp, Oryza sativa
ttcctgtttgttcccggcacgctttcaaagtcactcagctattaatgccttcggattccagagatgaaaatcacgcctttggttcgccaaatttccgtctcgtgagcttctcgtcgttcttgtgcttgttttccgtcgaatcctcgtgcaattctgtgagaaaaagagggcgatctccggtgctgccatgaacgcgctagccgccaccagccgcaacttccggcaggcggcgaggctactcggcctcgactccaaactccagaagagccttctgatccctctccgcgagatcaaggtagaatgcaccatccccaaagacgatggcaccttggcgacgtttgttgggttcagagtgcagcatgacaattcccgtggcccgatgaaaggcggcatcaggtatcaccctgaggtggacccagatgaagtgaatgcacttgctcagctgatgacatggaagactgctgttgctgctgtgccttatggtggagcaaagggaggcattgggtgcactcctggtgaactgagtagaagtgaacttgagcgtttaacgcgcgtgtttacccagaaaattcatgacctcattgggatcaatacagatgttccagcccctgacatgggaacaaatgcacagaccatggcatggatactagatgaatactcaaagttccatggccactccccagctgttgtcacgggaaagccaattgatcttggaggatccttaggaagagatgctgcgactggccgcggtgttatgtatgctactgaggctttattgactgaatacagcgagtcaatttcaggatcaacctttgttatccagggtttggggaatgttggttcttgggcagccaagctcatccatcagaaaggtggcaagatagttgcagttggagatgtaacaggtgcaatcagaaataaatccgggatagacatacctgctctcttgaagcacaggagcgagggtggatctttggaggacttctacggtgcagaagttatggacgctgcagagctgcttgtgcatgaatgtgatgttctcgtcccgtgcgccttgggtggtgttctcaacagggaaaatgcagctgaagtgaaggccagattcataattgagggggctaatcatcccactgatacagaagctgatgaggtaagctcaaaaaagggagtcattgtgctgccagatatctatgcaaattcaggcggcgtggtcgtcagctattttgagtgggttcagaacattcagggcttcatgtgggatgaagagaaggtgaacagggagctccaaaagtacatgaagaacgcttttcagaacatcaaggacatgtgcaaatcccaaaactgcaaccttaggatgggggcattcactttgggggttaaccgggttgcaaaggctactctgttgaggggatgggaggcatgagaatctgttgaggaatcacctcaattttgtaattcaaaatcttcattcggtaatatattggcacaatctggtacagtgttggttgtcactagattttacaaggaattctaactaaaggcaccttttagagcaagtttaatagtatagcccactactagctacaattcatctatagccaatctaatagccaattcatacaatagttggttactatacactattaatatatggccccccctgtcatacccacattgcatctttggagtcctgcttgaccttgcatcaaatcgaacatccttgccctcctctcatcttactcccatccttttaaccccccccttgtcgtttttccctgtatacctctctccgctactcgctctcgcatctctcccttctcttctatctctcttctgtttttttccctgcctgttcgctcacccatttcccgcccctgcttcttgctttgctatcttctccccttatttttccctcacgccgtcctcgatcgtggtgtgctccctgttgctctacttc

SEQ ID NO: 40 - DNA, 1700 bp, Populus canadensis
ggcacgagggttagttcttgtttagtcactaaccaccacctccctttagtttcttttcaaggacaagtctttttcttgagttttctttacctgggttctttttgtttcttttgaggtttattattattattattattattatttagacagcagccatgaatgctcttgcagctacaaaccgtaatttcagacatgctgcacgcattcttggtttggattctaaggttgagaagagtcttttgatccctttcagagagatcaaggtggagtgcacaattcccaaggacgatggaactttggcgtcttatattgggtttagagtgcaacatgataatgctcgtgggcccatgaaggggggaattagatatcatcccgaggttgaccccgatgaagtaaatgcccttgctcaactaatgacatggaagagtgctgtagcagacattccatatggtggagcaaaaggagggattggatgcaacccaggggatttgagtaaaagtgagttagaacgtctgactcgtgtcttcactcagaagatccatgatcttattggcgtccatacggatgttccagcaccagacatgggcacaaatgcccagaccatggcatggatattggatgagtactcgaaattccatggtcactcgcctgctgttgtgacagggaagcccataaatcttggtggatcactgggcagggaggctgcaactggtcgtggagttgtttttgctactgaagctttacttgctgaacatgggaagtccatcaaaggtttgacatttgcagttcaaggttttggaaatgtggggtcctgggcagctaagatcatacatgagagaggtgggaaagttatcgctgtgagtgacatcagtggtgcagttaagaatccaaatggacttgatattccagaactgatcaggcataaagaatccaccggtagtttgaaaaatttccagggtggagactccatggatgctaacgaactgcttgtacatgaatgtgatgtccttatcccatgtgctttgggtggagttctaaacagggaaaatgctgcagatgtgaaggccaagttcataatagaagcagcaaaccatcctactgatccagaagcagatgagattttagcaaagaaaggagtcgtggtgcttcctgacatatatgcaaattctggaggtgtcactgtcagctactttgaatgggttcagaatattcaaggttttatgtgggatgaagagcaagtgaacaagacgcttcagaactacatgactcgagcctttcataacatcaaggtcatgtgccagacacatgattgtaatcttcggatgggtgcctttaccctgggtgtaaaccgagttgctagggccactctgttaaggggatgggaagcataagtcctctcctcaagtctccagctccttttgcctcgtatcttcttgcagcttaagttgttttgctctcataaagtcttcatagttttatatttggattttaagtgtattcgttgagggaattattttctttttttgttcccaagttgaagctcctcctatcagcatttacaaaaattagttgttaccagtattacagcccttgattttgagactgaaaaacatatgttgtaatcttcgactggccttgtgctccagtttatgatattcaagaaaataattttgctagctatcatactggcttgttttttc

SEQ ID NO: 41 - DNA, 1652 bp, Pinus taeda
cggccgggggccgaatcgtgtccatgatttatattttagtcctgttctgtttttgactgttcgtcaatagcagtttgtgaagtgggttcttgctttttttcgagtgaagcagtgggaattctatcattttttgttttgggtgaaagagaaacccaataatcagatacttagcgttactgaagagggacttacttgattggagccatgaatgcactggcggcaacaagtcgtaatttccgacaggcagctagattgctgggtttagattccaggctggaaaagagtttactgattccatttcgggaagttaaggttgagtgtaccattccaaaagatgatggcacaattgcatcatatgtgggctatagagtgcagcatgacaatgctcgaggacctatgaagggaggaatacgctaccacccagaggttgatccagatgaggtgaatgccttagctcaattaatgacatggaagactgctgtggcaaacattccatatggaggtgcaaagggtggcattggatgttcaccatccagtttgagtaaaactgagttagaacgtcttacacgtgtttttactcagaagattcatcatttgattggaatcaacatggatattccagcacctgacatgggaactaattctcagacaatggcatggattctagatgaatattccaagtttcatggtcattctcctgcagttgttactggaaaacctcttgatcttggtggttcccttggtagggatgctgcaactggcagaggtgtggtaattgccacagaagccttgttagctgaacatggaattcccattcgagatcaacgctttgtcatccagggttttggaaacgtgggttcttgggcagcaaaactcatccatgagaaaggtggaaaggtcgtggctataagtgatatcacaggtgcattaaagaacaccagtggtcttgatattcctagcataataagatattcaaaggaaaatggtaatattaaggacttcacagaagcagaggcgattgacccagaatgcttgttacatgaagaatgtgatgtactaattcctgctgctctgggaggtgttctaagcagggaaaatgctagtgaattgagagctcaattcatagttgaagcagcaaatcatcccacagatccagaggctgatgagattttatcaaagaaaggagttgttatactgccagacatatatgcaaatgctggcggtgtaattgtcagctattttgagtgggttcagaatatccaaggttttaggtgggatgaacctcaagttaataacgaactacagacatatatgatgagtgctttcacagacatcaaggatatgtgtaaaaaacttgattgtgatctacgaatgggggcattctcacttggactggaacgtgtggctcgtgcaaccaacttaagaggttgggaggtataaatattactcttcagaagttgatggagagcgtgcagaccctttgtcaaagggtgcatgctactgagttcctgacagcagtcctttggggaatgcatttccgtcattcatttgatagttgatgctctcgagttcataagggtggttgccactgtaataataaaacttatttctttattcattaaaatatgatgtcaacaattcagggctggctg

SEQ ID NO: 42 - DNA, 1678 bp, Populus tremula
acataattcttgttatttcttgtttagtcactaatcaccacctcccttgagtttcttttcctggacaagtctttttcttgagttttccttagctgggttctttttgtttcttttgaggtttattattattgttattatttagacagcagccatgaatgctcttgcagctacaaaccgtaatttcagacatgctgcacgcattcttggtttggattctaaggttgagaagagtcttttgatccctttcagagagatcaaggtggagtgcacaattcccaaggacgatggaactttggcgtcttatattgggtttagagtgcaacatgataatgctcgtgggcccatgaagggaggaattagatatcatcccgaggttgaccccgatgaagtaaatgcccttgctcaactaatgacatggaagagtgctgtagcagacattccatatggtggagcaagaggagggattggatgcaacccaggggatttgagtaaaagtgagttagaacgtctgactcgtgtcttcactcagaaggtccatgatcttattggcgtccatacggatgttccagcaccagacatgggcacaaatgctcagaccatggcatggatattggatgagtactcgaaattccatggtcactcgcctgctgttgtgacagggaagcccatagatcttggtggatcactgggcagggaggctgcaactggtcgtggagttgtttttgctactgaagctttacttgctgaacatgggaagtccatcaaaggtttgacatttgcagttcagggttttggaaatgtggggtcctgggcagctaagatcatacaagagagaggtgggaaagttatcgctgtgagtgacatcagtggtgcagttaagaatccaaatggaattgatattccagaactgatcaggcacaaagaatccaccggtagtttgaaaaatttccagggtggagactccatggatgccaacgaactgcttgtacatgaatgtgatgtccttatcccatgtgctttgggtggagttctaaacagggaaaatgctgcagatgtgaaggccaagttcataatagaagcagcaaaccatcctactgatccagaagcagatgagattttagcaaagaaaggagtcgtggtgcttcctgacatatatgcaaattctggaggtgtcactgtcagctactttgaatgggttcagaatattcaaggttttatgtgggatgaagagcaagtgaacaagacgcttcagaactacatgactcgagcctttcataacatcaaggtcatgtgccagacacatgattgtaatcttcggatgggtgcctttacccttggtgtaaacagagttgccagggctactctgttaagaggatgggaagcataagtcctctcgtcaagtctccagctccttccgcctcgtatcttcttgcagctgaagttgttttgccctcataaagtcttcatagttttatatttggattttaagtgtattcattgaaggaattattttctttttttgttcccaactatgaagctcctccctcccatcagcatttacaaaaattagttgttaccagtattacaactcttgattctatatagatctgaaacaacatatgttgataatcttcgaccggccttgtgcaacagtttaagatattcaagaagaataaat

SEQ ID NO: 43 - DNA, 1694 bp, Populus trichocarpa
ctcactaatcaccacataattcttgttagttcttgtttagtcactaatcaccacctccctttagtttcttttcaaggacaagtctttttcttgagttttctttacctgggttctttttgtttcttttgaggtttattattattattatttttattatttagacagcagccatgaatgctcttgcagctacaaaccgtaatttcagacatgctgcacgcattcttggtttggattcgaaggttgagaagagtcttttgatccctttcagagagatcaaggtggagtgcacaattcccaaggacgatggaactttggcgtcttatattgggtttagagtgcaacatgataatgctcgtgggcccatgaagggaggaattagatatcatcccgaggttgaccccgatgaagtaaatgcccttgctcaactaatgacatggaagagtgctgtagcagacattccatatggtggagcaaaaggagggattggatgcaacccaggggatttgagtaaaagtgagttagaacgtctgactcgtgtcttcactcagaagatccatgatcttattggcgtccatacggatgttccagcaccagacatgggcacaaatgcccagaccatggcatggatattggatgagtactcgaaattccatggtcactcgcctgctgttgtgacagggaagcccatagatcttggtggatcactgggcagggaggctgcaactggccgtggagttgtttttgctactgaagctttacttgctgaacatgggaagtccatcaaaggtttgacatttgcagttcagggttttggaaatgtggggtcctgggcagctaagatcatacatgagagaggtgggaaagttatcgctgtgagtgacatcagtggtgcagttaagaatccaaatggaattgatattccagaactgatcaggcataaagaatccaccggtagtttgaaaaatttccagggtggagactccatggatgctaacgaactgcttgtacatgaatgtgatgtccttatcccatgtgctttgggtggagttctaaacagggaaaatgctgcagatgtgaaggccaagttcataatagaagcagcaaaccatcctactgatccagaagcagatgagattttagcaaagaaaggagtcgtggtgcttcctgacatatatgcaaattctggaggtgtcactgtcagctactttgaatgggttcagaatattcaaggttttatgtgggatgaagagcaagtgaacaagacacttcagaactacatgactcgagcctttcataacatcaaggtcatgtgccagacacatgattgtaatcttcggatgggtgcctttaccctgggtgtaaaccgagttgctagggccactctgttaaggggatgggaagcataagtcctctcctcaagtctccagctccttttgcctcttatcttcttacagctgaagttgttttgctctcataaagtcttcatagttttatatttggattgtaagtgtattcattgagggaattattttctttttttgttcccaacttgaagctcctcatatcagcatttacaaaaattagttgttaccagtattacaactcttgattttgagactgaaaaacatatgttgtaatcttcgactggccttgtgctacagtttatgatattcaagaaaataattttgctagct

SEQ ID NO: 44 - DNA, 1717 bp, Populus trichocarpa
atgaatgctcttgctgctacaagccgtaatttcagacatgcttcccgccttcttggtttggactctaaagttgagaagagtcttttgatcccttttagagagatcaaggtggagtgcacaattcccaaggatgatgggactctagtgtcttatgttgggtttagagtgcaacatgataatgctcgtgggcccatgaagggagggattagatatcatcctgaggttgaccctgatgaagtaaatgccctggctcaattaatgacatggaagagtgctgtagcagacataccatatggtggagctaaaggagggattggatgcaacccaggggatttgagtaaaagtgagttagaacgtctaacccgtgtcttcacccagaagatccacgatctcattggtgtccacacagatgttccagcaccagacatgggcactaatgcccagaccatggcatggatattggacgaatactcaaaattccatggtcactcacctgctgttgtgacagggaagcccatagatcttggtggatcactgggtagggaggctgcaactgggcgtggagttgtttttgctacagaagctttacttgctgaacatgggaagtccatcaaagatttgacatttgcaatacagggttttggaaacgtggggtcctgggcagcgaagctcatacatgagagaggtgggaaagttatcgctgtgagcgacatcactggtgcagttaagaatccaaatggaattgatattccggaattgctcaggcataaagaaaccactggtagtttgaaagatttccagggcgcagaatccatggatgctaacgaactactcattcataaatgtgatgtccttatcccgtgtgctttgggtggagttctcaacagggaaaatgctgcagatgtgaaggccaagttcataatagaggcagcaaaccatcctactgatccagaagcagacgagattttagcaaagaaaggagtcgtggtacttcctgacatatatgcaaattctggaggtgtcactgtcagctactttgaatgggttcagaatattcaaggttttatgtgggatgagcagcaagtgaacaacactcttcagaactacatgactcgagccttccataacatcaagagcatgtgccagacacatgattgcaatcttcggatgggtgcgttcactctcggcgtaagcagagttgcaagggccactctgttaaggggatgggaagcataagtcgtctcctcaagctgtagtttttttttttgcctcgtttatcatcttacagctgaagtcaccaatccattattacaaaaatgtattcattgggagttgttcaggacttgaaattcttcccatcagcatttaccaaaattagatgctaccattattacagctattgatttcaacacttgaaatatgttgtgatcttcaactggccatttaagaccgaaacagcatcctgataatttgatccttgtgcatcagttgtgatataaaagaaaataaagtttttgaaaaatacgatttcaaacgcgtttcgagatggctcttaatcaagctcaatgaaagcatgggcaaccatgtctccagctccttcataaactgcaccaataacagtagctagcagacctcactactgtcacaatcttgctgttgaagcataaagataaccaaacaagcagggcataaatttgttcgtttgaaatctcattct

SEQ ID NO: 45 - DNA, 2042 bp, Sorghum bicolor
accttccgcttcgaagacgtacccggtaccccctgactctaatcgagttccagtcccgctccaacgtttgagagagagcatgtccgacttgcgaactccttcgtcgtccttctccttccccaagagttccagatcgtgaagccagccactactctactccgagtcgtagctctcagcccccgcgcgtcgatcttatcctccacctccagtctaattccagctccgagcctccacccaccccgatccctccctcactattaatacagccccggtgcttcacccccgatctccatcacaaccatcaggccctcccctcctcgatcctcggacgaaacgcgccgccttttcttcaccccgtctcgtctcctgccgtttttgggtcgcccggatctcgccctcgtcgcgcgcgcgcttgttgtttctgtcggcggtgctggaaaggcggggtctttttcgtggccgcgcgccctcgtgatccttcttcttggggtggggaaaagaaaacgttgccgccgcgatgaacgcgctcgccgccaccagccgcaacttccggcgggcctcgaagctgctcggcctcgactccaagctcgagcagagtctgctcatcccgttccgggagatcaaggtggaatgcaccatccccaaagacgacggcaccttggcgtcgttcgtcggcttccgcgtgcagcatgacaacgcccgcgggccgatgaaaggcggcatccgctaccatcctgaggttgatccagatgaagtaaacgcccttgctcaactcatgacatggaagacagctgttgcagcagttccatatggtggagcaaagggagggatcggatgctctcctggtgaactaagtagaagtgagttggagcggttgacgcgagtatttacccagaaaattcatgatcttatcggaacgcatacagatgtcccagctcctgacatggggaccaatgcacagaccatggcatggatgttggatgagtactcgaaatttcatggtcactcaccagcagtcgtcacaggcaagccaattgatcttggtggatcactgggtagggatgcagcaacagggcgaggtgtcatgtatgcgaccgaggctctacttgctgaatatggaaaatgtatttctggatcaacttttgtgattcaaggttttggcaatgttggctcatgggctgcacgacttatccatgagaaaggtggtaagattattgcaattggagatgtgacgggttcaatcaaaaacatgtcgggtatagacatacctgctttgatgaagcataagaatgaaggtcatgccatgaaagactttcatggtgcagaagtcatggattcgactgagttgctagtgcacgaatgtgatgttcttgtcccttgtgccttaggtggagttcttaacaaggataatgcaccaagcgtgaaggccaaatttatagttgaagctgctaaccatccaactgatccagaggcagacgagattctcgccaagaagggagtggtcgtattacctgatatctatgctaattcaggtggtgtgatcgttagctactttgagtgggttcagaacattcaaggtttcatgtgggatgaagagaaagtgaacaatgaactagagaagtacatgagcagtgcttttcaacacatcaaggccatgtgcaagagtctggattgcaaccttaggatgggggcattcaccttaggagttaacagggttgcccgtgccaccctcttgagaggctgggaggcatgagaccattgactgcagattacagactcatcaggtgtattcaataattcatttccaacaatgttggaggatcagtgtttgatacggtaaaattcatcagaaaaaggctggcttggaaggaatccagttgaaataacattctgggtgtcgtgcttgttgatccagttcttagtgatgattattgaaaactgtacttaatcattatataatgttttagaaagcttatttggtctcaacagagttcatgtatctttccattcgtattaatggaattctggtatggggtttgaag

SEQ ID NO: 46 - DNA, 1585 bp, Solanum lycorpersicum
taaccaagaaaacatcaatttgctgctatgaacgctctcgctgcaaccaaccgcaatttccgacaagccgctcgaattcttggcttggattccaaaatcgaaaagagtcttctcattcctttcagagaaattaaggtggaatgcacaattcccaaggatgatggaacgttggtttcctatgttggatttagagtgcagcatgataatgctcgtggccctatgaaaggcggaatcagataccatcctgaggttgacccagatgaggtaaatgcccttgctcaactgatgacttggaagaccgctgtagccgacatcccatatgggggagctaaaggtggaatcggctgtaacccaaaggatttaagtgtgagcgagttggagcgacttactcgtgttttcacacagaaaattcatgatctaattggagttaatactgatgtgcctgcccctgatatgggcactaatgctcagactatggcctggattttggacgagtactcaaaatttcatggtcactcaccagccattgtgactggaaaaccaattgatcttggagggtcattgggaagagaagctgcaacagggcgtggcgtcgtctatgctacagaagctttacttgctgaatatgggaagcacgttaaggatttgactttcgcaattcagggatttggaaatgtaggagcctgggcaggaaagctcattcatgagagaggtggaaaggtagttgcagtgagtgacataactggagcgatcaagaactccaatgggatcgatataccagctttactcagtcataaagaaaaaacaggaaagctcatcgattttgctggtgcggatgtgatgaattctgatgaattgctaacgcatgaatgtgacgttctcatcccttgtgctttgggaggagttttgaacagagaaaatgctgataacgtcaaggccaaattcattatagaagcagcaaaccatcctactgatccagatgctgatgagattttatcgaagaaaggagtagtaatacttccagacatctatgccaatgctggaggagtgactgtcagctattttgaatgggttcagaatattcaaggatttatgtgggatgaggagaacgttaatagggagcttaagaaatacatgacaagagcctttcataacctcaagggcatgtgccattcacataattgcaatcttcggatgggtgcattcacattgggggtgaatcgtgttgcgcgtgccactcaattaagaggttgggaggcataatggcactcttttcacagcacaatgtactcatcctgcagcagatcattcgcaattcttcctttcaagtacgaaccatagaatgttctactaactgaaatgtgtacttgagacattaatcataacttgagtcatcaattacttagaattttatgttttttttttcatttgggaccttggagccatttggcccctatcgccattttcttatgagctcaggtgcttaactgttttttcccctcattttctagcatgaggattgcctgttatggagtaacttatactaagaacatgctgaatgcatattattgcattggtttatctt

SEQ ID NO: 47 - DNA, 1779 bp, Triticum aestivum
ccggagctcgcgcccccctcgatctccggacaaaaatccgccctttttacgcccgccttgccctttctggccgcgagagcctcccccacccccgccacgatctcgctccctcgcgtgcgcgtgtttccgtcgcccctgtctgtccctttcgcccgatttccttgcggttgaggaggttgttggggcgggccggggaagaaaagaagaggaaggaagttagccccgccgcgccgcgcctcgccgcaccgccgccgcagccatgaacgcgctcgccgcgaccagccgcaacttccgccaggccgcccggctgctcggcctcgactccaagctcgagaagagcctcctcatccccttccgcgagatcaaggtcgaatgcaccatccccaaggacgacggcacgctggcctccttcgtcggcttccgcgtgcagcacgacaatgcccgcgggcccatgaaaggtggcatccgctaccaccccgaggttgatccagatgaagtaaacgcacttgctcaactgatgacatggaaaactgccgttgcggcagtaccatatggtggagcaaagggaggaatagggtgctctcccggtgatttaagtaggagtgagttggagcgtctgacgcgtgtatttactcagaaaattcatgaccttatcggaactcataccgatattccagctccagacatgggaactaattcacagaccatggcatggatctttgacgagtactcaaaattccatggtcactccccagctgttgtcacagggaagcccatagatcttggtggatcattaggtagggatgcggccactgggcggggtgtaatgtacgctactgaggctctcctggccgaatatgggaagtctatttctggatcaacctttgttattcagggattcggtaatgttggttcatgggctgcacaactcatccatgagaaaggtggtaaggtaattgcacttggagatgtatcaggcacaatcagaaacaaagcaggaatagacgtacctgctctgatgaagcacagaaatgagggtggtcagttgaaagactttcatggcgctgaagtcatggatgcctcagagttgctagtgcatgaatgcgatgtcctcctcccatgtgccttaggcggggttcttaacagggaaaatgcccctgaaattaaggccaaatttataatcgaagctgctaatcatccaaccgatccagaagctgatgagattcttaccaagaagggagtggtcgtgttacctgatatctatgctaatgctgggggtgtgatcgttagctattttgagtgggttcagaacattcaaggattcatgtgggaagaagaaaaggtgaacatggagctccataagtacatgaacagcgcgttccagaacatcaaggccatgtgcaagtctcaagattgcaaccttaggatgggagcattcaccttgggagtgaaccgggttgctcgcgccaccatcttgaggggttgggaggcatgaggaattccagattccttattgaataatccatgcccggcagcgtggtggatgaaagttcttatatccaccatcattgatttggtaaattcatcataagttgccggcatgggaaataattttcggtgtacatgacagagacgatgggtttgttctttctgttagctaattatctgccctgggttgccaactatgtgatctagttctgtgtgattgtaaaccttcagatttgttgaatgtttaccaaaagtttctggattttaatatcaaaaaggttattttggcct

SEQ ID NO: 48 - DNA, 1653 bp, Vitis vinifera
ggtagatgagcacaatgtattgtaaaaaaaaaaatatcctctttacaggctatttataatgtatagatagactgacaaaccaatctttgagtcacttaactatcagccacaggggatacaaaccaattctccaattttttctctcattttcttttttgggtctgcttcttttcctagcaatcgttttttgtggcaatgaatgctctagcagccactaaccgcaattttcgccatgcttcccgcattcttgggttggactccaagctggagaagagtcttctgatacctttcagagagatcaaggtggagtgcacgattccgaaggatgatggaagtctggcgacatatgtggggttccgtgtgcagcatgataatgctcgtgggcccatgaagggagggatcagatatcaccctgaggtggatcctgatgaggtaaatgccctggctcaattgatgacatggaagaccgccgtaatcgacattccctatggtggtgcaaagggtggcattgggtgcaccccaaaggacttgagtatgagcgagttggaacgtctcactcgtgtctttactcaaaagattcatgatcttattggaactcatactgatgtacctgcaccggacatgggaactaatgctcagactatggcatggattttggacgagtactcaaaattccatggtcactcaccggccgtagtgactggaaagccaatagctcttggtggatccctcggtagggaggctgcaactggtcgaggtgttgttttcgcaactgaagctttacttgcgcaacatgggaagtcaatcaagggtttgacatttgttattcagggttttggcaatgttggatcttgggtagcaagactcatcggtgagagaggtggtaaaatcatagcggtgagcgacgtcactggagctgttaagaaccaaaatgggcttgatatagtggatttgcttaggcacaaagaagagactggttgtctaacgaatttcagtggcggagatcacatggatccgaatgaactgctcacacatgaatgtgatgttctcatcccatgtgctctaggtggagttcttaacaaagaaaatgctgcggatgttaaggcaaagttcataatagaagcagcaaatcatcctactgatccagaagctgatgagattctatccaagaagggagttgtaatccttcccgacatctatgctaatgctggaggtgtgaccgtgagctattttgagtgggttcagaatattcaaggttttatgtgggaagaagagaaggtgaataatgagcttcagaagtacatgaccaaagcttttcataacattaaggcaatgtgtcaatcgcacaactgcagtcttcgaatgggagccttcacattggcagtgaatcgagttgcgtgtgccacaacgctaaggggttgggaagcttaggttggttcttattcatcttctttggatatgttcccttgttacagctgaagaagcagattggtttcggtcattaccttccatcaaagtctcattatttttctttgtcaatcatgaacttctcccccacacattgatgggtgttgtaaacatttgaaattcatcatttcaatgaaaaaaaaaaacacttgatattatcaacaatgtgatgtgagattttgagtt

SEQ ID NO: 49 - DNA, 1778 bp, Zea mays
gaatgataactggtttatttgaatcccttctgcaatttttttgcaaatcatttacatctgggaacttcaaacctcagaccagaatttcattaaaaatgaaaaggtacagtaactctgtcgaggccaaattagctttctaaaatacaataaaatggttttgaataaaattttcactaatcatcaccaaaaactggtgaaccaaccattggtaactcaggatcaacaagcacaacacccttcaacgggctcattccaagccggatgaattttaccgtatacactgatcctccaacgttgttggacacgaattattgaatgcgcctgtcgaatctgtaatgcgcggtcaatggtctcatgcctcccagcctctcaaaagggtggcacgagcaaccctgttaactcctaaggtgaaggcccccatcctaaggtcgcaatccagagatttgcacatggctttcatgtgttgaaaagcactgctcatgtacttttctagttcatcgttaactttctcctcatcccacatgaaaccttgaatgttctgcacccattcaaagtagctaacgaccacgccacctgaattagcatatatatcaggtaatactactacccccttcttggcgagaatctcgtctgcctctggatcagttggatggttagcagcttcgattacaaatttggccttcacgtctggtgcattatccttgttaagaactccacctaaggcgcaggggacaagaacatcacagtcatgcactaacaactcggttgaatccaaaacttccgcaccatcgaagtctttcatcgcatgaccttcattcctatgcttcaccaaagcaggtatgtctataccagccgtgtttctaattgaacctgtcacatccccaattgcaataatcttaccacctttctcgtgaataagtcgagcagcccatgaaccaacattgccaaaaccttggatcacaaaagttgatccagaaatgcattttccatattcagcgagtagggcctcggtagcatacattacgcctcgccctgttgctgcatccctgcccagtgatccgccaagatctattggcttcccagtgacgactgctggggagtgaccatgaaatttcgagtactcatccagcatccatgccatggtttgtgcattggtccccatgtcaggagcagggacatctgtatgcgttccgataagatcatgaattttctgggtaaatactcgtgtcaaccgctccaactcacttctacttagttcaccaggagagcacccgatccctccctttgctccaccatatgggactgcagcaacagctgtcttccatgtcatgagttgagcaagggcatttacttcatctggatcaacctcattgtgatagcggatgccgcctttcatcggcccgcgggcgttgtcatgctgcacgcggaaccccacgaacgtcgccaagctgccgtcgtctttggggatggtgcattccaccttgatctcccggaacgggatgagcaggctctgctcgagcttggagtcgaggccgagcagcttcgatgcccgccggaagttgcgggtggtggcggcgagcgcgttcatcgcggcggcaactttttccaagaagaagaaggtataggatcacgaggggcgtgttgtgggttgtggccgcgaaaaggagccgccttcccagcaccgcggcggcgccgacagaaacaagaagcgcaagcgcgcgcgacgacgacgacgacgagagcgagatccgggcgacctaaaaagggcaggaggcgag

SEQ ID NO: 50 - DNA, 2161 bp, Aquilegia formosa x pubescens
ttacttgtaaaaggaatcagattccttattttgtttttagtaattaataagaccaaataaattttgtcactctacgtaatttacatagttataatgtgattttacttgtgattttgataaattcaacaaaaatcataaagtgaaatcacattacgatgatgtaagctaaatagagataaagataaaatcagttttgttttattaattactaaagaacaaaatgcggattctgattcccttttcccaaaaaggtaaatgattctgattccgttcatttaagttatggtattatccaaaaataaaaataaaaataaaaaaattatgttaaatttggttgacaagtttgaccatagctaagcatggttatctcaacttctgaagacagtcatccacacacacgacacacatgttattaaggttttgtttcttttaatttgtgcacgtgacaaaagcttgataggatttgtttgtcatcatagagtcattagttacttcgtttatctaattggtttaataataataattagcagaagatgcaaagtggtctctaatctccatcatcttctcttgctatatatatatatatatatatacatatcttcattgtctaaagaacaacaattcacttaaattgtttttgaattgttataaacactaattctctaattcaattttgtgtttagaaaacagtagttgacacttgacaattgtgttttgtttaaagccttcaagatcaatcatgaatgcattggtggcaacaagcaggaacttcaagcgtgctgctaggcttttgagtttagactcaaagcttgagaagagcttactcattccatttagagagatcaaggtggaatgcacaattccaaaagatgatgggaccttggcatcttttgttggcttcaggattcagcatgacaatgcaagaggcccgatgaaggggggaatccgctatcacccagaggttgaccctgatgaggtgaatgctctagcccaactaatgacatggaagacagcagtagctaatgttccatatggtggagctaaagggggcataggatgtgacccaggggaattgagcatctctgaacttgagaggctgacaagggttttcacacagaagatccatgatttgattggtgttcacactgatgttccagcacctgatatgggaacaaacccccagaccatggcgtggatactggacgaatattcaaagtttcatggctattcacctgctgtagtcactggaaaacctattgatcttggtggatccttgggcagagacgctgcaactggaagaggggtactttttgcaacagaggcactgcttaaggagtatgggaagagtatcaccggtcaacgatttgttatacagggcttcggaaatgtgggatcctgggctgcccaactcataagcgaaagtggtggtaaaattgttgcaataagtgatgttactggtgcaatcaaaaacagcaatggaattgatatacctagcttactcaaacatacccaagagaaccgtggagtaaaaggtttcaacggaggagactcaattgatccagcatcgatactggtagaggactgtgatgttctcatccctgccgcccttgggggtgtaattaacaaggataatgctaatgaaatcagagcaaagttcattattgaagcagccaatcatcctactgacccagaggctgatgaaatcttgtcaaagaaaggtgttgtcatactcccagacatattggccaactcaggtggagttactgtgagttactttgagtgggttcagaacatccaaggctttatgtgggatgaagagaaggtaaacaccgagctgaaaaactacatgaccaatggctttaaagatgtgaaagacatgtgccaaacccatcattgcgatcttcgaatgggagcattcacccttggagtcaatcgtgttgcccgggcaaccgttcttaggggctgggaagcctgataatgccgttaagtgatgtgacaaataaagaaggctcgaaatatgtcttgttattcttacttgccaaactatattcccaattcacatgagcttagcacaagtagttatttatgtctactaggtgtaagaatattatttctttgataactggttattttcccagtttatttgataactggttatatt

SEQ ID NO: 51 - DNA, 1668 bp, Asparagus officinalis
gtataaattctcccatttcatcaccaaatttttgagagagaaaagtttttgaagtctataggtttgtgatatttgatcctctttggttattttttgattaatttggatttttagggttcgagatcggtggaggtaggtgctgagatcagtgatcaggctctgaagaggaactatgaatgcactagcggccaccagtaggaacttcaagcaggcagctaagctgttgggattggaccctaagctggaaaagagcttactcatcccattcagggagatcaaggttgagtgtacaattcccaaagatgatggtactttggcatcatttgttggatttagggtgcagcacgacaatgctagaggccctatgaagggaggaattagataccactctgaggttgatccagatgaggtaaatgccttagcacaattaatgacatggaagacagctgtagcaaacattccatatggaggagctaaagggggtattggatgtagcccaggagatttgagcttatctgagcttgaaaggctcacccgagtttttacacaaaaaatacatgatctcattggggttcacactgatgttccagcaccggatatgggaaccaatgcacagacaatggcatggatacttgatgagtactcaaaattccacggctactctcctgcaattgtaactggaaaacctgttgatctgggtggatctttgggtagagatgcagctactggaaggggagtcctttttgcaacagaagcgctgctggcagaatatggaaagggcatttcaggccaacgatttgtaatccaggggtttggcaatgttggttcttgggcagctcaacttatcaccaaagctggtggaaaagttgttgcagtcagcgatgtcacaggagcaattaagcacagcaatggtctagacatagagaacttacttaagtattctgtcaaaaatcgtggtatcaaaggtttcagtggtggtgatgcaattgattccaactcattactaactgaagattgtgatgttctcattccagcagcacttggtggtgtcatcaacagggaaaatgcaaatgacgttagggccaagttcataattgaggcagctaaccatccaacagacccagaggctgatgagattctatcaaaaaaaggagtatgtattctgccagacatacttgcaaattcaggcggagttactgtcagttattttgagtgggttcagaacatccaaggattcatgtgggatgaagagaagggcaactctgagctgaagacttacatgaccaaaggcttcaaacatgtgaaggagatgtgcaagacccacaactgtgacctccgaatgggagccttcactcttggagtcaaccgagttgccagagcaactctcctccgaggttgggaagcataattatacaaaatccgccttgccccgatgcgaaattaataaatgtttggttgatttacgcttggtctatgtaatattacgagcaggatattttctgcatttatgattgaattctaattttctgacaactgatagggttccatttctgagtcatataatggaggtatactgaagggtgagttcagagttatgggtaggttggtgccatgcagccctgtaccgcatcaaatgcaatcatagtaacatttatttcttttgagttt

SEQ ID NO: 52 - DNA, 1479 bp, Arabidopsis thaliana
atttttccaactgtcttcatatcagactctctgatcaaataaacccaaaataaagaagagagaagaaagccatgaatgctttagcagcaaccaacagaaacttcaagcttgcttctaggcttcttggtttagactcaaagctcgagaaaagtcttctcattcccttcagagagatcaaggtggaatgtaccataccaaaagacgatggaactctagcatcctttgttggattcagagttcaacacgacaatgcaagaggtcccatgaaaggtggaatcagatatcatccagaggttgaaccggatgaagtaaacgctttggctcaacttatgacatggaaaacagcagtggctaagataccttatggaggagccaaaggaggaatcggttgtgacccgagcgagctaagtctctcagagctcgaacgtttgactcgagttttcactcagaagattcacgatcttattgggattcatactgatgttccagctcctgatatgggaaccggtcctcagacaatggcttggattcttgatgaatactcaaaattccatggacattctcctgctgttgtcactggaaaacccattgatcttggtggatctcttgggagagatgctgctacaggaagaggagtgttgtttgcaacagaagctttactcaacgaacatggaaagaccatatctggacagcgattcgccatccagggctttggaaatgtgggttcttgggcagcgaagttgataagtgacaaaggtggtaagattgtggcggtgagtgatgtcacaggagcaatcaagaacaataatggaattgacatcttgagtttgctcgagcatgctgaagaaaacagaggaatcaaagggtttgatggtgctgattcaatcgatcctgattcgattcttgtcgaagattgtgatattcttgtccctgcagctctagggggagtcatcaacagggaaaatgcaaacgaaataaaagccaaattcatcattgaaggtgctaatcacccaactgatcctgaggctgacgagatcttgaagaagaaaggtgttatgatcctcccagatatatacgcaaactcaggaggagtcactgtaagttacttcgagtgggttcagaacatacaaggattcatgtgggatgaggaaaaggtgaatagggagctaaagacctacatgactcgcgggttcaaagacttgaaagaaatgtgtcagacgcactcatgtgatctccgtatgggagctttcaccctcggtattaatcgtgtcgctcaagctaccactatcagaggctggggttcttgatacccccccatgggaagctaaagaacaagaattcagaaaatctttctatgttgttgatttgctttgtgatttgagtcaattctagagtaataaaaactatgtgctaattgcagtttaaccttctcaaattttctatcaacgaatctaatttgatgcaaatatttttactcca

SEQ ID NO: 53 - DNA, 1593 bp, Arabidopsis thaliana
caatcagactgacaccaatcttcctctttaacagtcgttttattacagcgttctgatcaaaactccagtgaaagttcaaagtacacagagagaaacaaaaaaagaagaagaagaagttgaagaagaagaagccatgaatgctttagcagcaacaaacagaaacttcaagttagctgctaggcttcttggtctggattctaagctcgagaaaagtcttctcatccccttccgagaaatcaaggtggaatgtaccataccgaaagacgatggtacactagcatcattcgttgggttcagagttcaacacgacaatgcaagaggtcccatgaaaggtggaatcagatatcatcctgaggttgatccggatgaagtgaacgcattggctcagctcatgacatggaaaacagcagtggctaagattccttacggaggagctaaaggagggattggttgtgatcctagcaagctcagtatctccgagctcgagcggttgactcgagttttcactcagaagattcatgatctcattgggattcatactgatgttccagctccagatatgggcactggtcctcagacaatggcttggattcttgatgaatactctaagtttcatggatactcgcctgcagttgtgactggaaaacccattgatcttggtggatcgctagggagagacgcggctactggaagaggagtgatgtttggtaccgaagctttgcttaacgagcacggaaagaccatatcagggcagcgttttgtcatccagggatttggtaatgtgggttcttgggcggcaaagctgataagtgaaaagggtgggaagattgttgccgtgagtgacattaccggagcaatcaagaacaaggatggtatcgatatcccggccttgctcaagcatactaaagaacacagaggtgtcaaagggtttgatggtgcagatccgatcgatccaaactccatactggttgaggattgtgatatcctcgtccctgcagcacttggtggtgtcatcaacagggagaatgcgaatgagattaaagcaaagttcatcatagaagcagctaatcatccaactgatccggacgcggatgagatcctaagtaagaaaggtgtggttattctcccggacatatatgcaaactctggaggagtcactgtaagttacttcgaatgggttcagaacattcaaggctttatgtgggaggaagagaaggtgaacgatgagctaaagacttacatgactcgctctttcaaggacttgaaagagatgtgcaaaactcactcttgcgatctccggatgggagctttcacactcggtgttaatcgtgtggctcaagctaccattctcagaggctggggagcttaaagattatctaatctcttatgcaatctctttagcagctcctgaataagaattgagccaaactttaatctactttttgttttatcctcctactttggcttagaggtcatcctgagttaacagatatgtgtttacaagtactagaagacgcttctgtatgtaataaaaccttggactctaatagttaatgagcttttttactctcttgttaataaaaccaaggtatc

SEQ ID NO: 54 - DNA, 1683 bp, Centaurea solstitialis
gaatcagtcactggtggaagctgagtagcttattcttgtcctcctcatacttgaaaaataacttatacttgtttgccatcatcaatttcacaactacagattcctaattctcctgtttcatctttttcaattctgtgagtgaagtgagctccaagtgaagaacaacagattggaactcttctctggtgtttgtatctccacttgttatctgggtatttggtaaacaagcatgaacgctttagctgcaacaaaccgaaattttaagctggcagcacgtctgctgggcttagactcgaaacttgaaagaagtctgctcattccattcagggaaatcaaggttgagtgtacaataccaaaggatgatggtactttggtatcttatgttggcttcaggattcaacatgataatgctcgtggaccaatgaaaggaggaatcagataccatccagaggttgacccagatgaggtgaacgctttagcacaactgatgacatggaagacagcagtagcgaatataccatatggtggagcgaaaggagggataggatgtaatcctggagaattaagcatatctgagctcgaacgacttactagagttttcacacaaaagatacacgatctgattggaatccacaccgatgttccagcacctgatatgggaaccaatccccagacaatggcatggatattagatgaatattccaaatttcatggatactcgccggctgttgttacaggaaaacctattgatcttggtggatcattgggtagagatgctgctactggaaggggagtactctttgcaacagaagcccttcttaatgattacggaaagactgttgctggccaacgatttgttatacagggtttcggaaatgttggttcatgggctgctcaacttattcatgaagctggtggaatagttgttgcagtaagtgatatatcaggagcaataaaggataacaatgggcttgacatcccaaacctacttaaacatgtcaaagaacatagaggagtgaaaggttttggtggtgcaaattccatagatgctaattctattttggttgaagattgtgacatcctcatcccagctgcccttgggggtgtaatcaacagggaaaatgcaaatgagatcaaagccaaattcattatcgaagcagctaaccatcctactgaccctgaagccgatgagatcttatcaaagaaaggcgtcgttatcctccccgacatatttgcaaattcaggaggggtaacagttagttactttgaatgggttcagaacattcaagggtttatgtgggatgaggcaaaagtgaacaaggagctaaagaaatacattggacaaggtttcaaagatgtgaaggagatgtgtagtactcacaactgtgatttacgtatgggagcgtttacgttgggagtcaatcgtgttgctagagctaccgttcttagaggttgggaagcctaacaaacaaacatgaatgaagaataatccaacgggaggcctttagagccaaaattcccgttgtttaacgtgttatgtgcacatgaaccatcccggcttcgggagtgttaacgttgttttctttctttgttcgcttgttatccaaagctttcaaaaggtttttctttgaaagcaggtgtttatgcaacttgctgtgtttatatttgaaacttgcaagaccc

SEQ ID NO: 55 - DNA, 1236 bp, Glycine max
atgaatgcactagcagccaccaacaggaactttaagttggcctctaggcttctgggattggattcaaagcttgagaaaagtttactgattccattcagggaaatcaaggttgaatgtaccatacctaaagatgatggcaccttgcaatcttatgtagggttcagggttcaacatgataatgccagaggccccatgaaaggaggaatcagataccatcctgaggttgaccctgatgaagtgaatgctttagcacaactaatgacatggaaaacagctgtagcaaatataccatatggtggtgccaaaggagggatagggtgtgacccagcagaattaagtatatctgaattagaaagacttactagagtttttacacaaaaaattcatgatttgattggaactcacacagatgtgccagcacctgatatgggaacaggaccacagaccatggcatggatactagatgagtattccaaattccacggttactctcctgcagtagtgactggaaaacctatagatcttggtggatctctcggtagagacgcggctacaggacgaggagtcctctttgcaacagaggctttgcttaatgagtatgggaagagtgtatctggacaacggtttgtcatacagggttttggaaatgtagggtcatgggctgcccaattaattagtaataaaggtggaaaagttgttgctgtgagtgacataactggagccataaagaacagcaatggtcttgacatcccaagcctacttgagcattccaaagtgcacaggggagtaaaaggattcaatggtagtgatccaatagaccctaactcaatattggttgaagattgtgatgttctagtcccagcagctcttgggggtgtcatcaatagggaaaatgcaaatgaaatcaaggccaaatttattgtggaagcagctaatcacccaactgacccagaagctgatgagattttgaagaagaaaggggttgtgatcctcccagacatatttgcaaattcaggaggcgttacagttagctactttgagtgggttcagaacatccaaggtttcatgtgggatgaggagaaagtgaacaatgagctaaagacctacatgaccaaaggtttcaaagatgtgaaggaaatgtgcaaaacccatgaatgtgatcttcgtatgggagccttcaccctggcagttaaccgtgtcgcacgtgctactgtccttaggggctgggaagcttga

SEQ ID NO: 56 - DNA, 1543 bp, Gossypium raimondii
caagaaatctctaaaatcttctgatttttctaagtctttttcttatcttctgtttggcttctgagaaagtgttttaagaagaacaatgaatgcattagtggcaaccaacagaaacttcaagctagcagccaggcttcttggtttggattctaagcttgaaaagagtctcctcattcccttcagggaaatcaaggttgaatgcaccatacccaaagatgatggcacattggcaacttttgttggctttaggattcaacatgacaatgctagaggtcctatgaaaggaggaatcagatatcaccctgaggttgaccctgatgaagtgaatgcattggcgcaactaatgacatggaagacagcagttgcaaacatcccatatggtggggctaaaggtggtataggatgtaaccctggagagttgagcaaatccgaactagaacgcctcactcgagttttcacccagaaaatacatgatcttatcggaattcataccgatgttccagcacctgatatgggtactggtccgcagacaatggcatggatactagatgagtactcaaaattccatggtcattcacctgctgtggtgaccggaaaaccgattgatcttggaggatcacttggcagagatgcggccactggccgaggggtgctgtttgcaactgaggcccttcttaatgaacatggcaagtccatctctggacaaaaatttgtaattcagggttttgggaatgttggttcttgggctgcacaactcatccatgaaaagggagggaaggttgttgcattaagtgatataacaggggccatcaagaacagcaatggcattgatattccctcattgctcaaacatgtgaaagaaaacaagggtatcaaagggttccatggtggggattccatcgacccgaaatcggttcttgtcgaagactgtgacatactcatcccggcagcactcggaggcgtcatcaacagggaaaatgcaaatgagattaaagcaaagttcattattgaagcagctaaccatccaaccgacccagaggctgatgagattttgtcaaagaaaggagtcattatactgccagacatttatgcaaactctggaggagtcactgttagttactttgagtgggttcagaacattcaaggtttcatgtgggatgaagagaaggtgaacagtgagctaaagacatacatgaccaaagggtttaaagatgttaaggagatgtgccaaacacacaactgcgacctccgaatgggagcctttaccctcggagttaaccgcgttgctcgggctaccgttcttagaggttgggaagcataagaatgcttagtgctaatgctggttttgaaataaacatggaggatactatggacccctctgattcttgcccactattgtggtaaaacctcattcatattgaggagcttcaaatgaagttttgtcatttgtatttgttgctttaatgttgaattctatcttagtagcaatttcgaaggcaaaaaaaaacgaacacggaaggaatacgaatatatgaagatcacg

SEQ ID NO: 57 - DNA, 1795 bp, Helianthus annuus
gtggagatgagtagtttattcctgtctgcactcatactcacgttgcaagcatcaatttgacaagcatcctatcctatacacacgcaccaattcctatttcttttacatcaatcatcaagtgaatttcaacccccccgctgaggacggatcggacttgagcgattgttttccggctgcttctctgatctgatcagtactccgatcaacttctgactattttgccaaacaaagatgaatgctttagctgctacaaaccgaaacttcaagctagcatctcgcctgttgggtttagactccaaacttgaaaaaagtttgctcattccattcagggaaatcaaggttgagtgtacactaccaaaggatgacggtaccttggtgtcttatgtcggatttaggatccaacacgacaatgctcgcggacccatgaaaggaggaatcagataccatccagaggttgacccagatgaagtcaatgctttagcacaattgatgacgtggaaaacagcagtggcaaatataccatatggtggagcaaaaggaggaatcggatgtaacccaggagaattaagcatatctgaactagaacgacttactagagttttcacacaaaaaatacatgatctgattggaattcacacagatgttcctgcacctgatatgggaaccaatccccagacaatggcatggatattagatgaatactccaagtttcatggatactcacctgctgttgttactggaaagcctattgatcttggtggatcacttggtagagatgctgccacaggaaggggtgtcctctttgcaacagaagcccttcttaatgatcaaggaaagagtatcgcgggacaacggtttgttatacagggatttggaaatgttggttcatgggctgctcaacttattcatgaagccggtggcaaagtggttgccgtgagtgatgtaagtggagcaataaaggacaaaaatggaattgacatccctagtctgatcaaacatgttaaggaacacaaaggagtcaaaggttttagtggtgcaaatgcaatagagggtagttctattttagttgaagattgtgatatcctcatcccagctgccctcgggggtgtaatcaacagggaaaatgcaaaggatatcaaagccaaatacataatcgaagcagctaaccatcctactgatcctgaagccgacgagatcttatcaaagaaaggtgtcatcattctccctgacatatttgcaaattcaggaggggtaacagtcagttactttgaatgggttcagaacattcaagggtttatgtgggatgaagaaaaggttaacgcagaactaaagaaatacattcaacaaggtttcaaagatgttaaagaaatgtgtaaaactcacaactgcgatctacgtatgggggcatttacattgggacttaatcgcgttgcaagagctacggttcttagaggttgggaagcctaagaaacttggcatgtagcgactcaaataaaacgatggagggcttttacggacaatgcccgttgtttcaagttgtttttttttatgttttacatgaactgggattcttgactttgatttgtttatgttttaacctatttccaacagttttcggaatgtttttttcgaaagcgggttatgaaatattcaagtatgtgttatggtgaatttgagttactttaggaaactttgtggctacaatccatcgacttatgccttctgggttgttgccaacttttaatttcatgatcatataatcaagaattcccatggttcaactgcgaaaaaaaaa

SEQ ID NO: 58 - DNA, 1670 bp, Helianthus argophyllus
ggagatgagtagtttattcctggtctgcactcatactcacgttgcaatcatcaatttgacaagcatcctatcctatacacacgcaccaattcctatttcttttacatcaatcatcaagtgaatttcaacccccccgctgaggacggatcggacttgagcgattgttttccggctgcttctctgatctgatcagtactccgatcaacttctgactattttgccaaataaagatgaatgctttagctgctacaaaccgaaacttcaagctagcatctcgcctgttgggtttagactccaaacttgaaaaaagtttgctcattccattcagggaaatcaaggttgagtgtacactaccaaaggatgacggtaccttggtgtcttatgtcggctttaggatccaacacgacaatgctcgcggacccatgaaaggaggaatcagataccatccagaggttgacccagatgaagtcaatgctttagcacaattgatgacgtggaaaacagcagtggcaaatataccatatggtggagcaaaaggaggaattggatgtaacccaggagaattaagcatatctgaactagaacgacttactagagttttcacacaaaaaatacatgatctgattggaattcacacagatgttccagcacctgatatgggaaccaatccccagacaatggcatggatattagatgaatactccaagtttcatggatactcacctgccgttgttactggaaagcctattgatcttggtggatcacttggtagagatgctgccacaggaaggggtgtcctctttgcaacggaagcccttcttaatgatcaaggaaagagtatcgcgggacaacggtttgttatacagggatttggaaatgttggttcatgggctgctcaacttattcatgaagccggtggcaaagtggttgcagtgagtgatgtaagtggagcaataaaggacaaaaatggaattgacatccctagcctgatcaaacatgttaaggaacacaaaggagtcaaaggttttagtggtgcaaatgcaatagagggtagttctattttagttgaagattgtgatatcctcatcccagctgcccttgggggtgtaatcaacagggaaaatgcaaaggatatcaaagccaaatacataatcgaagcagctaaccatcctactgatcctgaagccgacgagatcttatcaaagaaaggtgtcatcattctccctgacatatttgcaaattcaggaggggtaacagtcagttactttgaatgggttcagaacattcaagggtttatgtgggatgaagaaaaggttaatgcagaactaaagaaatacattcaacaaggtttcaaagatgtgaaagaaatgtgtaaaactcacaactgcgatctacgtatgggggcatttacattgggacttaatcgcgttgcaagagctacggttcttagaggttgggaagcctaagaaacttggcatgaagcgactcaaataaaacgatggagggcttttacggacaatgcccgttgtttcaagttgtttttttttttatgttttacatgaactgggattcttgactttgatttgtttatgttttaacctattcccaacagttttcggaatgttttttcgaaagcgggttatgaaatattcaagtatgtgttatggtga

SEQ ID NO: 59 - DNA, 2289 bp, Hordeum vulgare
  misc_feature (1746)..(1748): n is a, c, g, or t
  misc_feature (1752)..(1752): n is a, c, g, or t
  misc_feature (1754)..(1754): n is a, c, g, or t
  misc_feature (1758)..(1758): n is a, c, g, or t
  misc_feature (1764)..(1765): n is a, c, g, or t
  misc_feature (1798)..(1798): n is a, c, g, or t
  misc_feature (2040)..(2044): n is a, c, g, or t
  misc_feature (2047)..(2047): n is a, c, g, or t
  misc_feature (2076)..(2077): n is a, c, g, or t
  misc_feature (2223)..(2223): n is a, c, g, or t
cgtacccgaagctcctccatagtctttgcgctgccgccccttcgcaccagtcaccaccgtccaccaccggcacctcgctgctaatccttggcgcgggtccggaggggggaatttcgccgagcaggatgaacgcattggcggccaccagccggaacttcaagcaggcggccaagctgctcggcctcgactccaagctcgagaagagcttgctcatccccttcagggagatcaaggttgaatgcacaatcccgaaagatgacgggacattagcatcctatgttgggtttagggtgcagcatgacaatgccaggggtcctatgaagggtggaatcagataccaccatgaggttgatcctgacgaggtcaatgctttggcacaactcatgacatggaaaacggcagtggctaatattccgtatggaggagctaaaggtggcataggatgcagtcctggagacctgagcatatcggagctcgagcggcttacccgagttttcacccagaaaattcatgacttaattggcatccacaccgatgttccagctcccgatatgggcaccaacgcacagacaatggcatggattctggatgagtactcaaagttccatggttactcacctgctgtggtgacaggaaagcctgtggaccttggaggatcactgggaagagatgcagctactggaaggggagttttgtttgcaactgaagccctacttgcagagcatggcaaaggcattgcaggccagcgttttgtaatccagggatttggtaatgttggctcctgggctgctcaactgatcactgaagctggtggcaaggtgatcgccatcagcgatgtcacaggggctgtcaagaacaccaatggcattgacatagccaagctaatgaagcactccgcggagaaccgcgggatcaagggctttgacggtggtgacgccgtcgacccgacctcgctcctcaccgaagaatgcgacgtcctcatcccggcagcgctgggaggggtcataaacaaggacaatgctgatgccatcaaagcgaagtacatcatcgaggctgcgaaccacccgacagaccccgaggccgacgagatcctggcgaagaagggggtgctgatcctgccggacatcctggccaactcgggcggcgtgacggtgagctacttcgagtgggtgcagaacatccaggggttcatgtgggacgaggagaaggtgaaccgggagctcaagacgtacatgacccgcgccttccgggacaccaaggagatgtgccgctcccaccactgcgacctccgcatgggcgccttcaccctcggcgtcaaccgcgtcgcccgcgccaccgtcctccgcggctgggaggcctgatcgccggccggcatcctgcaatgcccttgctctctcgccgtctccatgggcatcccatcgaagtcacgactcaacaaaaaagttgaataaacgagcccgtgtgttgtctcataagctctgatctcttggagaccgacagaacagtagcatcaccatcttcttcgtgtaatccgcagctgaaagcgaaacacagcaatgtaatccggtttttttcttggcaacttcgatcctgttgatgaaaaaaaaaaaaaaaaaaactggggggggggcccgggacccaattccccctatagggagtcgttttacccccgctcactggccggcgttttacaacgtggggacgggaaaaaccctggggttccccaacttaatcccctggcagaannngggngncaanaccaannggccagagcatactcataggtgggtggggtcgncaatatttgttgcttgggtttcgtttcggaatttgagtttccaataaaccaaattacaccttttgtcggttcacttttaaagaattgtttttttagaaaacttttatattacaaggccctggcttggttggtaataaccttcccggctttttgcggggaacttggtgggtcccttattggttttaaggccttatccacttttccccttaaatcaaattattagcgaccggttggggggcccnnnnnganatattctttcgcgcataaatgataaaaanntctccctcggggggggggggcggggcaaccacaattcccctttaagagaggggtttatataggcgccctcgatgtggtggtttattaaaaaggtggggtggagagaaactctgtgttgctcaacaattattgcctctgagaaaggnagagtatgggtcacatgtagtgattcgtgggggcgtgcgccggccatagaagccgtagatgggtgg

SEQ ID NO: 60 - DNA, 1411 bp, Ipomoea nil
ggttttcaggatcatgaatgccttggctgctaccaaccggaacttcaagctggcggcacggctgctgggtttggattcgaagctcgagaacagtttgctcataccattccgcgaaatcaaggttgagtgtacgataccaaaagacgatgggtcattggcgagttttgtggggtttagagttcagcatgacaatgctaggggtcctatgaaaggagggatcagataccatcccgaggttgatccagatgaggtgaatgccttagcacaactaatgacatggaagacagcagtagccaacataccgtatggcggagccaagggcgggataggatgcaatccgagcgagctgagctgctctgaactggaacgactcactcgagtttttacccagaagatacatgatttgataggcacccacaccgatgtcccagctcctgatatgggaacaggtccacagacaatggcatggattctggatgagtactcaaagttccatggctattcacctgcagtagtaacaggaaaacctattgatcttggaggttctctaggtagggatgccgctacagggaggggcgttctcttcgcaacagaagccctgctcaacgagcatggcaagagcattgccgggcaacgctttgttatacagggatttggtaatgttggctcgtgggcggctcaactgatcagcgaacaaggtggaaagattgttgctgttagtgatgtcacgggtgccataaagaacgaaaatgggattgacataccaagcctgatgaaacacgtgaaggagaaccgtggagtcaaaggtttccacgatggagttgctatagattctaattcgatattggttgaagattgtgacatcctcatcccagctgccttaggaggcgtgattaacagggataatgcaaaagacatcaaagccaagttcatcattgaggcagctaatcatccaactgatcccgaagcggatgagattttagcgaagaaaggagttgtcattctgccagacatatatgcaaattcaggtggagtcactgtcagttatttcgaatgggttcagaacattcaaggctttatgtgggacgaggagaaagtgaatgccgaactgaagacatatatgaccagaggtttcaaggacgtgaaggatatgtgcaaaacccacaactgtgacctccgtatgggcgctttcacgctaggcgttaatcgggttgccagggcaacacttctgaggggatgggaagcttgaaaaccggatgcataaatgcataatcaccgcttttttcttgaataaaggaaggctccaagaatcccgaatcccctcaccctctatccaattctaattcattccaaactctgcaatagagttctggcaaatgcctcttttttttgtgtgtttgaccaatgtaac

SEQ ID NO: 61 - DNA, 1686 bp, Mesembryanthemum crystallinum
ccggttggataaattccctgaatttatgctctgctctgctctcaccatccccgttttacatccattataatctaccttcaaaaacccaacttttgtttatctctttcagttgaaaaacgtttcttcctcaattgaagccttctttgcttaatttgaagcagtaaaatcatgaatgcgcttgcagcaactaatagaaattttaagcaagcatcacggattctggggttggatgcgaaacttgaaaagagtctgctcattccatttagggagatcaaggttgagtgcaccatacccaaagatgatggcactctagcatcctttgttggatttaggattcagcatgacaatgctcgaggccccatgaagggcgggattagataccaccctgaggttgatcctgatgaggtcaacgcattagcccaattaatgacatggaagacagcagtagcaaatatcccttatgggggcgccaagggtggcataggatgtaacccggcagatttgagcatttctgagcttgagcgattgacgagagtgttcacgcaaagggttcatgacctcatcggaacccacactgatgtcccagcacccgatatggggacaaacgcacagacaatggcctggatattggacgagtactcaaaatttcatggttattcacctgcagttgttactggaaaacctattgaccttggtggatctcttggtagagatgcggcaactggaagaggagtgatgtttgctgcagaggctctgttgaatgagtacggaaaaagtatatctgggcagcgctttgtgatacagggattcgggaatgtgggttcctgggcagcacaactcattcatgaaatgggtgggaagattgttgctgtaagtgatattactggagccattaggaacaagaatgggcttgatataaccaacttattcaaacatgtcaaagaaactcgtggagtcaaaggattcagtggttcagatgccatagatgccaactcaatattggttgaagattgtgatgtactaatcccagcagctcttggcggtgttattaacagggagaatgcaaatgaaatcaaggccaaatttattgttgaggcagctaaccatccgactgatcctgatgctgatgagattttgaaaaagaagggcgttgtcatccttcccgacatatatgcaaactctggtggagttacagttagttactttgagtgggtgcagaacattcaaggcttcatgtgggatgaacagagagtgaacaacgagctcaagacatacatgacaagggggctcaaggatgtgaaagaaatgtgtcaaacgcacaattgtgatcttcgtatgggagctttcaccctcggacttaaccgtgttgctagggcaaccctcctcagaggttgggaagcctgatcatttaagccaatatcattcattccccaataaaaaagaaacctcccccaatctttcccatttcggataccgttatgtggtctcccgccgcgctcattaacatcaaggtggtatcgttcgtctttgccttggtcatccggtgtcgctgatttatgcgggggaatttttttcttttttcccattggatatgagagaaattagatatttatcttgaattgtcatgtgtaattttcatttagttgtaactttaaaattaaaatgagagtggggaagagtttcaat

SEQ ID NO: 62 - DNA, 1236 bp, Medicago truncatula
atgaatgcactagcagccaccaataggaactttaagttggcctctaggcttttgggattggattcaaagattgagaaaagtttgttgattccattcagagaaattaaggtggagtgtagcatccctaaagatgatggaaccttggctacatatgttggattcagaattcaacatgataactctagaggccctatgaaaggagggatcagataccatcctgaggttgaaccagatgaagtgaatgcattagcacaactaatgacatggaaaacagcagtagcaaatttaccatatggtggtgccaaaggagggataggggttgacccttcagagttaagtgcttctgagttagaaaggcttactagagtttttactcagaagattcatgatcttattggagttcatactgatgtgcctgcacctgatatgggaacaggaccacagacaatggcatggatactagatgagtattcaaaatttcatggtcattctcctgcagtagtgactggaaaacctatagatcttggtggatctctaggaagagatgctgctactggaagaggtgtcctctttgcaactgaggctttgcttaatgaatatggaaagagtgtatctggtcaacggtttgtcatacagggttttggaaatgtggggtcatgggctgcacaattaataaatgaaaagggtggaaaaattgttgctgtaagtgacataacaggagctataaagaacagcaatggtcttgacattccaagcctacttaagtattccaaagagaatagaggaattaaaggatttcatggtggtgattcaattgatcctaagtcaattttggttgaagattgtgatgttcttatccctgctgctcttggtggagtcatcaatagggaaaatgcaaatgagattaaagccaaatttattgtggaagcagccaatcacccaactgacccagatgcagatgagattttgaaaaagaaaggggttgtgatccttccagacatatatgcaaattcaggaggagttacagttagctactttgagtgggtccagaacatacaaggattcatgtggaatgaagaaaaggtgaacaatgagttaaagacatacatgaccaaaggtttcaaagatgtgaaagaaatgtgtcaaacacataattgtgatcttcgtatgggagcctttacacttgcagttaaccgtgtagcaagggctactgtccttagaggttgggaagcttaa

SEQ ID NO: 63 - DNA, 1530 bp, Medicago truncatula
gttatagtctcaatattaatttacagtgacactgcaagatctattttccacgtctcttttgataaaaggttgaatattgtgttaggttcttctggttggcaagggaaaaatgaatgcactagcagctacaaacaggaattttaagttggcttctaggcttttgggattggattccaagcttgagaaaagtttacttattccattcagagaaatcaaggttgaatgtaccattcctaaagatgacggcacgttgcaatcttatattggattcagagttcaacatgataatgctagaggccctatgaaaggagggatcagataccatcctgaggttgatccagatgaagtgaatgctttagcgcaactaatgacatggaaaacagctgtagcaaatataccatatggtggtgccaaaggagggatagggtgtaacccctcagaattaagtatatccgagttagaaagacttaccagagtttttactcagaaaattcatgatctaattggaactcacatggatgttcctgcacctgatatgggaacaggaccacagaccatggcatggatactagatgaatattccaaatttcacggctactcgcccgcagtggtgactggaaaacctatagatcttggtggatctttaggtagagatgcagctacaggaagaggagtcatgtttgcagcagaggctttgcttaatgagtacgggaagagtatatctggacaacggttcgtcattcagggttttggaaatgtagggtcttgggctgcacaattaattgatgagaaaggtgggaaaattgttgctgtgagtgacataactggagccataaagaacagcaaaggtcttgacatccctagcctactcaagcataccaaagagcacaagggagtaaaaggattccatggtggtgattcatttgattctaactcaatattgcttgaagattgtgatgttctaatcccagcagctcttggaggtgtcatcaatagggaaaatgcaaatgaaattaaggcaaaatttatagttgaagcagctaatcacccaactgaccctgatgctgatgagattctaaagaaaaaaggtgttgtgattctcccagacatttatgcaaattcaggaggtgttacagttagttactttgagtgggttcagaacatccaagggtttatgtgggatgaggagaaagtgaacaatgagctaaaaaactacatgaacaggggtttcaaagatgtgaaagacatgtgcaaaactcatgaatgtgatcttcgaatgggagccttcagtctgggagttaaccgtgtggcaagagctactgtccttagaggttgggaagcttgagatcttcatcttgtagttgctgcttggaataaaagagagcttttagtctcagttgcacttattcttgctgtcaaaaagtttttgttgctttcatgtgttgagtgaactgtgttttcaccctaaattttatcagattaaagatgagggttccatgtactattattggattaacattccatttgctt

SEQ ID NO: 64 - DNA, 1598 bp, Nicotiana tabacum
gacctaccaaatatagtggcctacacactccatgctaattatatttgcttgatcaagtgcagcctccgtttgttgaattcttggtttttgggatattgactttctctgggttttttgaggaaaatcatgaatgctttagcagcaacaaatagaaactttaagctggcagctcgactgctcggtttagactctaagctggaaaagagtctgctaatcccctttagagaaattaaggtggagtgtacaataccaaaagatgatggctcattggcatcttttgttggattcagagtacaacatgacaatgctcgcgggcctatgaaaggcggaatcagataccatcctgaggttgacccggatgaggtaaatgccttagcacagctaatgacatggaaaacagcagtagccaatataccatatggtggggctaaagggggcataggatgtagtcctagtgacctgagtaactctgagctagaacgacttactcgagtatttactcaaaaaatacatgacctgatcggaattcacactgatgttccggcaccagatatgggaacaaatccacagacaatggcatggattctcgacgagtactcaaaatttcatggttattcacctgcagttgtcaccggaaaacctattgatcttggtggatccttaggcagagatgcagctaccggaaggggtgttctctttgctacggaagcactgctaaaagagcatggcaagagtattgctgggcagcgttttgttatacagggatttgggaatgttggttcctgggcagcaaaactcatcaatgagcaaggtgggaaaatcgttgcagtaagtgacataacaggcgccataaagaacgagaatggactcaacatagcaagcctactcaaacacgtgaaggaaaatcgtggagttaaaggtttcaatgatgcacgtccaatagatccacattcaatactagtagaagattgtgatgttcttataccagctgcccttggcggagtaatcaacagggataatgcaaatgatattaaagccaaatatattattgaggcagctaaccatccgactgatccagaagctgatgagattttggcaaagaaaggagttgtcatcctaccagacatatacgctaattcaggtggtgtcaccgttagttattttgagtgggttcagaacatccagggctttatgtgggatgaggataaagtgaatgctgagttgaagacatacatgacaagaggctttaaagatgtcaaggatatgtgcaagactcacaactgtgatctccgaatgggtgccttcacgctgggcgttaatcgtgtagctagagcgactgttctaaggggatgggaagcttgagaatgagacacatggtggcttgtcttgtttttcatatgaaaacatggagttcacacttgtctgtattaagttgtatgttcagcataatttggcaaaagctttatccatttgatgttctgggttgacctccacctttttcgccttcagcccttttttttttcctttctacatcttgtaaactaaaaatgttctacccaaggactgtggcttctgaataataattgaaagatgcactt

SEQ ID NO: 65 - DNA, 1469 bp, Ocimum basilicum
gcacccgttatgtttcttcatataccatagattcataatcatgaacgctttagctgcaacgaacagaaacttcaagctcgcggctcggctactcgggctcgactcgaaattgcaaaagagtttattgatcccttttagagagatcaaggtcgagtgtacgattccgaaagatgatggcaccttggcatcgtttgttggattcagagtccagcatgacaatgcacgtggcccgatgaaaggaggcattagataccatccagaggttgaccctgatgaagtgaatgctctggcccaattgatgacatggaagaccgcggtggcgaatatcccatatgggggtgctaaaggaggaatcgggtgcaacccatcggatttgagcatctctgagctggagcgactcactcgagttttcactcagaagatacacgacctaattggctcgcacaccgatgttccggccccggacatgggtaccggtcctcagaccatggcttggatactagatgagtactcaaaatttcatggttattctcctgcagtggtgactggaaagccaattgatttgggaggatctcttggaagagatgctgccacgggtagaggcgtgttgttcggaaccgaagccctgttgaacgagttcgggaagagcattgcaggacaacgagtcgttatacagggttttggcaatgtcggttcatgggcagctcagctcattagcgaacaaggggggatcatagtagcagtgagtgacatcaccggggcgataaagaatcccaacggactagacatcccacgcctcgtcaaacatgtccgcgaagcccgaggagtgaagggcttcgcgggggccgactctatcgaccccgactcgatcttggttgaggattgtgacattttgatccctgcagccctaggaggagtcataaacaaggacaatgccaaggaaatcaaggccaaattcataatcgaggcggctaaccacccgacggacccggagggtgacgagatactcgcgaagaagggggtggtggtccttccggacatatacgcaaactcgggcggagtcacggtgagctacttcgagtgggtgcagaacatacaagggttcatgtgggacgaggaaaaagttaattctgaactgaagacgtacatgactcgtggttttaaggatgtgaaagagatgtgtaggacccacaactgcgatctgaggatgggggcgtttagcctgggcgtgaaccgggttgcccgggccaccctccttagagggtgggaagcttgatatatggatgtggcgaggcctttttctttttaaccgaataaaagaaaagaggacatctcactcgaataaagattttttttatctatcttttgtatgagatgatgttatttgagtaatattgatgatttatatttatgtttggatctttgaattgatgtaaatgtaattattttcatatttaataccatgcttt

SEQ ID NO: 66 - DNA, 1236 bp, Oryza sativa
atgaatgcgttggcagcgacgagcaggaacttcaagcaggcggccaagctgctgggcctggactccaagctggagaagagcttgctcatcccgttcagggagatcaaggttgaatgcacaattccgaaagatgatgggactttagcatcttatgttgggtttagggtccaacacgacaatgctaggggacctatgaagggtggaatcagataccaccatgaggttgatcctgatgaggtcaatgcgttggcacaactaatgacatggaagacggccgtggctaatattccatatggaggagctaaaggtggaataggatgcagccctggagatctcagcatctccgagctagagcgacttacccgtgttttcacccagaaaatccacgacttgattggcattcatacagatgttccagctccagatatgggaaccaactctcagacaatggcgtggatacttgacgaatactcaaagtttcatggttattcacctgctgtggtgactggaaaacctgttgaccttggaggatcacttggaagagatgcagctactggaaggggagttctgtttgctactgaagccttgcttgcagagcatggcaagggcattgctggccagcgttttgtaatacagggatttggtaatgttggatcctgggctgctcagctgatcagtgaagctggtggcaaggtgattgccatcagtgatgtcactggagctgtcaagaacagcaatgggcttgacattgcaaagctaatgaagcactcatcagagaaccgcgggatcaagggtttcgacggaggcgatgcaatcgacccacgctcactgcttactgaagaatgtgatgtcctcatcccggcagcacttggtggagttataaacaaggacaacgcaaatgagatcaaagcaaagtacatcattgaggctgcaaaccaccccacagaccctgaggcagatgagatcctgtccaagaaaggcgttctcattcttccagacatcctcgcgaactccggtggtgtcacagtgagctacttcgagtgggttcagaacattcagggtttcatgtgggacgaggagaaggtgaacaatgagctgaagacctacatgacccgtgggttcagggatgtgaaggagatgtgcaggagccaccactgcgacctccgcatgggcgccttcaccctcggtgtcaaccgtgtcgctcgcgccaccgttctcagaggatgggaagcatga

SEQ ID NO: 67 - DNA, 1748 bp, Picea glauca
aacccaaacaccccaaatacagggcattgtgcttatgaatcatccatatccaagctgttatttatttcattaattaaatcgataattggttcctgacccttctgtccttcgaagcgacctgtgaatgctcgagcatattcgtgtgaacacttatcccgaaattatagcgttgagttttctggttcctataaaatgacagggccccgggctcttcgtctctatcggtttcctctttctcatcgaccagctgagatcttaagtggaaattgagcttcgaaaaatattttcattgctaataatattgagtttcccaccatgaatgctctagctgcaacaagtcgtaatttcaagcgagcagctcggcttctggcgttggattcgaagcttgaacgaagtttgctcattccttttcgagagatcaaggttgagtgcaccattcctaaagatgatggaactctagcctcgtatgtaggctttagggtgcagcatgacaatgctcgaggacccatgaaaggaggaatacgctaccatccagaggttgatccagatgaggtaaatgccttagcacaactaatgacatggaaaactgcagtagctaacataccctatggaggagcaaagggtggtattggttgcgatccacggagtttaagtatcagtgagttagaaaggcttactcgtgtctttactcagaagatccatgacttgattggagtccacatagatgttccagcacctgacatgggaactaatccacagacaatggcctggatattagacgaatactcaaaattccatggatactcacccgcaattgttactggaaaacctgttgatctaggtggatcccttggcagggatgcggcaaccggtagaggtgttttgtttgcaacagaagccttgttggctgagtatggtaaaagcatctcagatcaacgttttgtaatccagggttttggaaatgtcggttcctgggcagctgaacttattcatgaaatgggtggaaagatagtagcagtgagtgatatttcgggagctataaagaacagcaatggccttgacattccagctttaatgaagcacacaaagacaaatggtggtgttaaaggatttgaagcagcagattcagttgatccaaaaaccctattgcttgaagattgtgatgtgctcatccctgctgctttgggtggtgttcttaatagggagaatgctagtgaagtaaaggccaaattcataatagaggcagccaatcatcccacagatccagaagctgacgagattctatacaagaagggtgttatagtactaccagatatatatgcaaattctggtggtgtgactgtcagctattttgagtgggttcagaacatccaaggttttatgtgggatgaggagaaggttaactccgagctgaaaaagtatatgacaagctcttttcaacatctcaaagaaatgtgcaaaactcacgattgtgatctgcgaatgggagcttttactcttggagtcaatcgtgttgctcgtgccactctcctaagaggctgggaagcttaaaatagaggcattgacaaacatgaaattcctttcttcacgtttcacagtttcaataattcgactggttataattcactttcctccatgttaaccacattgtatgctattttggccaggtattcttttgaatatcatgctgttgctagtgaaattatcagtctttatgataagatagttactggtccgttttacaagcc

SEQ ID NO: 68 - DNA, 1616 bp, Picea sitchensis
tggaagcgacctgtgaatgctcgagcatattcgtgtgaacacttatcccgaaattatagcgttgagttttctggttcctataaaatgacagggccccgggctcttcgtctctatcggtttcctctttctcatcgaccagctgagatcttaagtggaaattgagcttcgaaaaatattttcattgctaataatattgagtttcccaccatgaatgctctagctgcaacaagtcgtaatttcaagcgagcagctcggcttctggcgttggattcgaagcttgaacgaagtttgctcattccttttcgagagatcaaggttgagtgcaccattcctaaagatgatggaactctagcctcgtatgtaggctttagggtgcagcatgacaatgctcgaggacccatgaaaggaggaatacgctaccatccagaggttgatccagatgaggtaaatgccttagcacaactaatgacatggaaaactgcagtagctaacataccctatggaggagcaaagggtggtattggttgcgatccacggagtttaagtatcagtgagttagaaaggcttactcgtgtctttactcagaagatccatgacttgattggagtccacatagatgttccagcacctgacatgggaactaatccacagacaatggcctggatattagacgaatactcaaaattccatggatactcacccgcaattgttactggaaaacctgttgatctaggtggatcccttggcagggatgcggcaaccggtagaggtgttttgtttgcaacagaagccttgttggctgagtatggtaaaagcatctcagatcaacgttttgtaatccagggttttggaaatgtcggttcctgggcagctgaacttattcatgaaatgggtggaaagatagtagcagtgagtgatatttcgggagctataaagaacagcaaaggccttgacattccagctttaatgaagcacacaaagacaaatggtggtgttaaaggatttgaagcagcagattcagttgatccaaaaaccctattgcttgaagattgtgatgtgctcatccctgctgctttgggtggtgttcttaatagggagaatgctagtgaagtaaaggccaaattcataatagaggcagccaatcatcccacagatccagaagctgacgagattctatacaagaagggtgttatagtactaccagatatatatgcaaattctggtggtgttactgtcagctattttgagtgggttcagaacatccaaggttttatgtgggatgaggagaaggttaacgccgagctgaaaaagtatatgacaagctcttttcaacatctcaaagaaatgtgcaaaactcacgattgtgatctgcgaatgggagcttttactcttggagtcaatcgtgttgctcgtgccactctcctaagaggctgggaagcttaaaatagaggcattgacaaacatgaaattcctttcttcacgtttcacagtttcaataattcgactggttataattcactttcctccatgtcaaccacattgtatgctattttggccaggtattcttttgaatatcattctgttgctagtgaaattatcagtctttatgataaggt

SEQ ID NO: 69 - DNA, 1755 bp, Populus trichocarpa
aggattcacgttcatgcagtaacctttgccaggcttgaagattttgttttccacatttggtgcttaacttggatcatcgttgataaattttggaagagatcgggctgtcgtcttcaccatcttgagacagtttcaggagcagtcatgaatgcattagtggcaaccaacaggaacttcaagctggcagctaggctgttggggttggactccaagcttgagaaaagtttgcttattccgttcagagaaatcaaggttgaatgtaccatacccaaagatgatggcactttggcatcttttgttgggttcagggttcagcatgacaatgccagaggtcctatgaagggaggaatcagatatcacccagaggttgacccagatgaagtcaatgcattagcacaacttatgacatggaagacggcagtggcaaatattccctatggcggggctaaaggtggaataggatgtaatccaggggagttaagtgtctctgaactagaacgacttacccgggtgttcactcagaagatacatgatctgataggaatccacacagatgttccggctcctgatatgggaactggtccacagactatggcgtggatacttgatgagtactccaaattccatggctactcacctgctgttgttactggaaaaccaattgatcttggtggatctctaggcagagatgctgccactggacagggagtgctcttcgcaacagaagccctgcttaatgagcatgggaagaccatatcaggtcaacgatttgtcatacagggtttcggaaatgtgggtgcctgggctgcccaactaatcagtgagcagggtgggaagattgttgccataagtgacatcactggagctatgaagaacagcaaagggattgatattccaagcctactcaaacatgccaaggaacataatggtgtgaaaggattccatggtggggatcccatagatcccaagtcaatactagttgaggactgtgatattctcattccagcagcccttggaggtgtcatcaacagggagaacgcaaatgatattaaagccaaattcattattgaagctgccaaccatccaactgaccctgaggctgatgagattttgtcaaagaaaggagttgttattcttccagacatttatgctaactcaggaggcgttactgttagttacttcgagtgggtgcagaacatccaaggattcatgtgggatgaaaagaaagtgaacagtgaactaaagaattacatgaccaaaggtttcaaagatgtgaaagaaatgtgcaaaacccatgattgtgatctccgtatgggagccttcactctaggtgttaaccgtgttgcacgggcgaccgttcttagaggttgggaagcctgagatgcctgctacttctctgttcttaaaggttttgttatatgtattgccctagtttcctcctcacctgagtttctacccctaaggcgtttctctatgcactgcaaattctcctacaaagaacagagactagagaggaggaattccttagttttattgtaagcttttttgggtggaatgatttgaacttggacgcccaacttctaaaacctcggccttgaggcctttgtctctgaacattgcaagttctaaattacattaagggtttgattagattcctaatcataatttcagtcttaagatgagtttcaactttcaaaaacccatggagaatcccaagatggtagctttttagcttgttcgcactaaaaaagtttc

SEQ ID NO: 70 - DNA, 1595 bp, Populus trichocarpa
atgaatgcattagtggcaaccaacaggaacttcaagcgggcagctaagctgttggggttggactccaagcttgagaaaagtttgctgattccattcagagagattaaggttgaatgtaccatacccaaagacgatggcactttggcgtcttttgttgggttcagggttcagcatgacaatgccagaggtcccatgaaaggggggatcagataccacccagaggttgatccagatgaagtcaatgcattagcacaacttatgacatggaaaacagcagtagcgaacattccctatggtggggctaaaggtggaatagggtgtaatccaggggagttaagtgtgtctgaactggaacgacttacccgtgtgttcactcaaaagatacatgatctaatcggaatccacacagacgttccagctcctgatatgggaactggtccacagactatggcatggatactggatgaatactccaagtttcatggctactcacctgctgttgttactggaaaaccaattgatctcggtggatctctaggcagagatgccgccactggacgaggagtgctcttcgctacagaagccttgcttaaggagcacgggaagaccatatcagggcaacgattcgtcatacagggttttggaaatgtgggtgcctgggccgcccaactaatcagtgagcagggagggaagatcgttgccgtaagtgacatcactggagctataaagaacaacaaagggcttgatattccaagcctactcaaacatgccaatgaacacaaaggtgtgaaaggattccatggcggggatccgatcgatcccaaatcaatactagttgaggactgtgacattctcattccagcagcccttggaggtgtcatcaacagggagaatgcaagtgatattaaatccaaatttattattgaagctgccaaccatccaactgatcctgaggctgacgagattttgacaaagaaaggtgttgttattcttccagatatatttgctaactcaggaggagtcactgttagctactttgagtgggttcagaacatccaaggattcatgtgggatgaagagaaggtgaacaatgaactaaagaattacatgaccagaggtttcaaagatgtgaaagagatgtgcaaaacccacaactgtgatctgcgtatgggagccttcactctaggtgttaaccgcgttgcacgagctaccgttctgagaggttggggagcctgagatgttggctgctctgaataaagataggcttcaacgaggcccctcgctcatacttgtcgagatctctcttgcttatggaagtttaaacaacttcttttcatgtgtattgccttaatttccacctcttaaggtgtttctcgtatgaactgcaaattctcttacagaaagtagggaggaattgctgaggttttatggtctaataagtgttttcttttagctttttagtttcttttgaggtggaaagatttgatcttggataccctcgaggcatttatcactgcccaatacctcgttggcaaagttcattgtaagttggaaattgcgtcatgggttcttaataatttaaacttcctattcat

SEQ ID NO: 71 - DNA, 2522 bp, Solanum lycopersicum
  misc_feature (227)..(229): n is a, c, g, or t
gagaggagatgtccagcgttctccgtaagatgagggcaaccggtggtggtgaaaagaagaagtgaagtctctatccttattttgacaattgaggaactgagtttattagttaatacatgatctttttgagttagctataaaattctctaaactttgacacaattatggctttgaattttcattgagattgtgacattttgctcaaaaaaaaaaaaaaaaaaaaaaannnaactcgagactagttctctctctctctctcaagcacttggttttcagcaatggcttcttcagtaatgtcctcagcagctgttgccacccgcggcaatggtgcacaagctagcatggttgcacccttcactggactcaagtccaccgcttctttccctgtttcaaggaagcaaaaccttgacattacctccattgctagcaacggtggaagagtcagttgcatgcaggtgtggccaccaattaacatgaagaagtacgagactctgtcgtaccttcctgatttgtccgacgagcaattgctcagcgaaattgagtacctattgaaaaatggatgggttccttgcttggaattcgagactgagcacggatttgtgtaccgtgagaaccataagtcaccaggatactacgatggcaaatactgaaccatgtggaagttgcccatgttcgggtgcactgatgcaacccaggtcttggctgaggtgcatgaggcaaagaacgcttacccacaggcatggggccgggtgggcggattcgacaatgttcgtcaagtgcaatgcatcactttcatcgcttacaagccccaacgatactaagttctagaaaaactaattgccctatgtttatagggacagtttgtttgaattctcctttgggttttcccttgagaaaatgaatacaatttctcatattatctagtgcataattgattttgattctttttttctccttaattttttgatattttttaggtactctttttggagaaaacatgaatgctttagcagcaactaatagaaattttaagctggcagctaggcttcttggtttagactcaaagttggaactaagtctgctaatccctttcagagaaattaaggtggagtgtactataccgaaggatgatggcacattggcatcttttgttggattcagggtacagcacgacaatgcacgagggcctatgaaaggcggaatcagataccacccggaggttgatcctgatgaggtgaatgcattagcacagctaatgacatggaagacagcggtcgccaatataccatatggtggggctaaaggaggaataggatgtagtcctagtgacctgagtatctctgagttggaacgacttactcgagtatttactcaaaaaatacatgacctaatcggaattcacaccgatgttcctgcaccagatatgggaacaaatcctcagacaatggcatggattttagacgagtactcaaaatttcatggttattcacctgctgtggtaactggaaaacctgttgatctcggtggatctctaggcagagatgcagctactggaaggggggctctctttgctacagaagccctgcttaatgagcatgggaagagtgttgctggtcagcgttttgttatacagggatttggtaatgttggttcctgggctgcaaaactcatccatgagcaaggtgggaaagttgtagcagtgagtgacataactggtgccataaagaatgagaagggaatcgacatagaaagcctattcaaacacgtgaaggaaactcgtggagttaaaggtttccatgatgcacatccaattgatgcaaattcaatactggtagaagactgtgatgttcttatcccagctgccctcggtggagtaatcaacaaggataacgcaaatgaaattaaagccaaatatattattgaggctgctaaccatccaactgatccagaagctgatgagattttgtcaaagaaaggagtcaccatcctaccggatatttatgccaactcgggtggtgtcaccgtcagttattttgagtgggtccagaacatccaaggctttatgtgggatgagaaaaaagtgaatgatgagttgaagacatacatgacaagaggttttaaagatgtcaaggatatgtgcaagactcacaactgtgacctccgaatgggcgccttcaccttaggtgttaaccgtgtagctagagcaaccgttcttcgaggatgggaggcgtaagaatgaggcctgtgatggcttttttctttctcaaaaataaaaccatgaaaagcatggagttcacttagttctccacatttattttctgcattcaacatattttggcagaactttatccatttgatgtttactggcttggacctcagttttccgtttgtttttttctttctaaatcttgtgaactgtaagttctgcccatggacaaagtgtcttctaaatagtactcctaatacaatacattgaaagaggcactttgccgtatttatcagttaaactagtctattgtcta

SEQ ID NO: 72 - DNA, 1606 bp, Solanum tuberosum
gatattgcatatatctagtgcatatttgctgcagcctctgattattgacttcttgattattaattttttaggtactctttttggagaaatcatgaatgctttagcagcaactaatagaaattttaagctggcagccaggcttcttggtctagactcaaagttggaacaaagtctgctaatccctttcagagaaattaaggtggagtgtactataccgaaggatgatggcacattggcatctttcgttggattcagggtacaacacgacaatgcacgaggacctatgaaaggcggaatcagataccatccagaggttgatccagatgaggtgaatgcattagcacagctaatgacatggaagacagcggtcgccaatataccatatggtggggctaaaggaggcataggatgtagtcctagtgacctgagtatctctgagttggaacgacttactcgagtatttactcaaaaaatacatgacctaatcggaattcacaccgatgttcctgcaccagatatgggaacaaatcctcagacaatggcatggattctagatgagtactcaaaatttcatggttattcacctgctgtggtaactggaaaacctattgatctcggtggatctctaggcagagatgcagctaccggaaggggtgctctctttgctacagaagccctgcttaatgagcacggcaagagtattgctggtcagcgttttgttatacagggattcgggaatgttggttcctgggctgcaaagctcatccatgagcaaggtgggaaagttgtagcagtaagtgacataacaggtgccataaagaatgagaagggaatcgatatagaaagccttttcaaacacgtgaaggaaactcgtggagttaaaggtttccatgatgcacatccaattgatgcaaattcaatactggtagaagactgtgatgttcttatcccagctgccctcggtggagtaatcaacaaggataatgcaaatgaaattaaagccaaatatattattgaggctgctaaccatccaactgatccagatgctgatgagattttgtctaagaaaggagttaccatcctaccggatatttatgctaactcgggtggtgtcaccgtcagttattttgagtgggtccagaacatccaaggctttatgtgggatgagaaaaaagtgaatgatgagttgaagacatacatgacaagaggttttaaagatgtcaaggaaatgtgcaagactcacaactgtgatctccgaatgggagccttcaccttaggtgttaaccgtgtagctagagcaaccgttcttcgaggatgggaggcgtaagaatgaggcccgtgatggcttttttctttctcaaataaaactatgaaaagcatggagttcacttagttctccatattactttctgcattcaacatattttggcagaagctttatccatttgatgtactggcttggacttcaatttttcgttttccgttttcttttcttctttttaagtcttgtgaactgaagttctgcccatggacaaagtgacttctaaatagcactcctaatacaaagcattgaaagaggcactttgccatatttatcagttaaact

SEQ ID NO: 73 - DNA, 1350 bp, Triticum aestivum
ccacgcgtccgacacttcgcggctattccactcgccggcgcggcggctccggagggggaatttcgtcgagcaggatgaacgcattggcggccaccagccggaacttcaagcaggcggccaagctgctgggcctcgactccaagctcgagaagagcctgctcatccccttcagggagatcaaggttgagtgcacaatcccgaaagatgatgggacattagcatcctatgttgggtttagggtgcagcatgacaatgccaggggccctatgaagggtggaatcagataccaccatgaggttgatcctgacgaggtcaatgccttggcgcaactgatgacatggaaaacagccgtggccaatattccgtatggaggcgctaaaggtggcatcggatgcagtcctggagacctgagcatatcggagctcgagcggcttacccgagttttcacccagaaaattcacgacttaattggcatccacaccgatgttccagctcccgatatgggcaccaacgcacagacaatggcatggatactggatgagtactcaaagttccatggctactcacctgctgtggtgacaggaaagcctgtggaccttggaggatcactgggaagagatgcagctactggaaggggagttctgtttgccactgaagccctacttgcagagcatggcaaaggcattgcaggccagcgttttgtaatccaggggtttggtaatgttggctcctgggctgctcaactgatcactgaagctggaggcaaggtgatcgccatcagcgatgtcacaggggccgtcaagaactccaatggcattgacatagccaagctgatgaagcactcggcggagaaccgcgggatcaagggctttgacggaggagacgccgtcgacccaacctcgctgctcacggaagagtgcgacgtcctcatcccggcagcactgggaggagtcataaacaaggacaatgctgatgccatcaaagcaaagtacatcatcgaggctgcgaaccacccgacagaccccgaggccgacgagattctggcgaagaagggggtgctgatcctgccggacatcctggccaactccggcggggtgacggtgagctacttcgagtgggtgcagaacatccaggggttcatgtgggacgaggagaaggtgaaccgggagctcaagacgtacatgacccgcgccttccgggacaccaaggagatgtgccgctcccaccactgcgacctccgcatgggcgccttcaccctcggcgtcaaccgcgtcgcccgcgccaccgtcctccgcggctgggaggcctgatcgctcgccggccggcatcctgcaatgcccgtgctctctc

SEQ ID NO: 74 - DNA, 1427 bp, Vitis vinifera
atgaatgcattggtggcaaccaaccgaaactttaagctggcagctcgccttttggggttggactcaaagcttgaaaagagtttactcatcccgtttagggaaatcaaggttgagtgcaccatacccaaagacgatggtactttggcatcatttgttggattcagggttcaacatgacaatgctagaggccccatgaagggagggatcagataccacccagaggttgacccagatgaggtaaatgctttggcacaactaatgacgtggaagacagcagtagcaaatattccatacggtggggccaaaggagggataggatgtaatccaggggagctaagcttgtctgagctagaacgactgacaagagtcttcacccaaaagatacatgatctaattggggtctccacagatgttccagcacctgatatgggaacaaacccacagaccatggcatggatactagatgagtactcgaaatttcatggctactcacctgctgtggtgactggaaagcctattgatctcggtggatctctgggcagagatgcagctacaggaaggggagtactctttgcaacagaggcccttcttcatgaacatgggaagagcattgccggacaacggtttgtcatacaggggtttgggaatgtgggttcttgggctgcccaactcatcagtgaacacggtggaaagattgttgctgtaagtgacatcactggagccattaagaatagcaaaggaattgacattccaagcctcctcaagcattctgtggaacaccgtggagtcaaaggtttcaatggggcagatccaatagatccaaagtcaatattggttgaagattgtgacgtcctcatcccagcagcccttgggggtgtgatcaacagggaaaatgcaaatgaaattaaagccaaatttattattgaagcagccaaccatcctacagaccctgaagcagatgagatcctatcaaagaaaggtgttgtcattcttccagacatatatgcaaactcggggggagtcactgtcagttattttgagtgggttcagaacattcaaggtttcatgtgggatgaggagaaagtaaacaatgaactgcggacgtacatgaccagagggttcaaagatgtgaaggagatgtgcagaacccacaattgcgatctgcgcatgggagcattcacccttggagttaatcgtgttgccagggcaaccgtccttaggggttgggaagcctaagagggttgctatctgaataaagatgagggagtctcctttgggacaagagtccctcattcttgtccgtgtttgatatggctgttgcattttaactagttcagcaatggttttgtcattccctttatgggctttaatcttattagctgtatcgacaatttcataaggtttaatcatcatctcctatttaagga

SEQ ID NO: 75 - DNA, 1433 bp, Vitis vinifera
atgaatgcgctggcggcaaccaaccgaaactttaagctggcagctcgccttttggggttggactcaaagcttgaaaagagtttactcatcccgtttagggaaatcaaggttgagtgcaccatacccaaagacgatggtactttggcatcatttgttggattcagggttcaacatgaccaatggagaggtcctatgaagggggggatcagataccagccagaggttgatccagatgaggtaaatgctttggcacaactaatgacatggaagacagcagtagcaaatattccatacggtggggccaaaggagggataggatgtaatccaggggagctaagcttgtctgagctggagcgactgacaagagtcttcacccaaaagatacatgatctaattggggtctccacagatgttccagcacctgatatgggaacaaacccacagaccatggcatggatactagatgagtactcgaaatttcatggctactcacctgctgtggtgactggaaagcctactgatctcggtggatctctgggcagagatgcagctacaggaaggggagtactctttgcaacagaggcccttcttcatgaacatgggaagagcattgccggacaacggtttgttgtacaggggtttgggaatgtgggttcctgggctgcccaactcatcagtgaacatggtggaaagattgttgctgtaagtgacattactggagccattaagaatagcaaaggaattgacattccaagcctcctcaagcattctgtggaacaccgtggagtcaaaggtttcaatggggcagatccaatagatccaaagtcaatattggttgaagattgtgacgtcctcatcccagcagcccttgggggtgtgatcaacagggaaaatgcaaatgaaattaaagccaaatttattattgaagcagccaaccatccaacagaccctgaagcagatgagatcctatcaaagaaaggtgttatcattcttccagacatatatgcaaactcggggggagtcactgtcagttattttgagtgggttcagaacattcaaggtttcatgtgggatgaggagaaagtaaacaatgaactgcggacgtacatgaccagagggttcaaagatgtgaaggagatgtgcagaacccacaattgcgatctgcgcatgggagcattcacccttggagttaatcgtgttgccagggcaaccgtccttaggggttgggaagcctaagagggtagctatctgaataaagatgagggagtctcctttgggacaagagtccctcattcttgtccgtgtttgatatgcctgttgcattttaactagttcagcaatggttttgtcattccctttatgggctttaatcttattagctgtatcgacaatttcataaggtttaatcatcatctcctatttaaggaaaaaaa

SEQ ID NO: 76 - DNA, 1847 bp, Marchantia polymorpha
ggggaattgcagcgagctggtgattgtcttggtcttctgaagggagtgtcggatcgatagcttgctcgaacctcgaagagatgcactgaagctgtggctaaaatcgaaggagaaaaaactggtgaccagaccaaaatcaaagcgcgagtgatcaactgagacaagatgaacgcattagcagcaacaaataggtacttcaagcaagcggtcaggattcttggcatcgactctaaagtggagaaaagtctccttattccctaccgggaaatcaaggtggaatgcaccattccaaaggatgatggtactttggtatcgtacgtcggcttcagagttcaacacgacaatgcccgagggcctatgaagggtggcatccgctaccaccccgaggtggagcccgatgaagtcaatgcgttggcacagttgatgacgtggaaaactgcggttgccaatatcccttatggtggagcaaaaggtggaattggctgcaatccaagggagctaagtatcaccgagcaagagcgcttaacccgtgtattcacgcaaaaaatccatgatcttatcgggcctcacctagatgtcccagctccagatatgggaacgaacgctcagactatggcttggatattggatgaatactcaaagtttcacggtcacactccagcggtggtcactggcaagcccatcgatttagggggatccctgggcagagatgcagccaccggacggggtgtggttttcggcacacaggctttgctggctgaccacgggaagactatcgcagggcaaaagtatgtcatccagggctttggtaatgtagggtcatggacagcaaaaattcttcatgagcaaggtggtattgtcaaggctattagcgatgtgagtggagctgtgaagaatgatgccggtcttgatattccagctctagtgcagcatgtcagcatccatgggggagtcaaaggatttgctgggggtgactctttggacgctgcgtccatactggcagaggattgtgatgtcttgattccagcagctcttggtggggttttgacgagggaaacagctaaggatgtgaaggcgaaatttgttattgaggctgcaaaccatcctacagatcccgacgccgatgagatcttagctcaaaagggcgtggtcatacttccagacatctacgccaattccggaggagtcaccgtcagctatttcgagtgggttcagaacattcaaggcttcatgtgggacgaggagaaagtaaacaatgaattgcaaaagtacatgatcagagcctacgcgaacatcaaggatctgtgcaaaaaccaaaattgcaatttaaggatgggtgctttcagcctcggagtaggacgcgttgccagagctaccatgttgcgtggatgggaagcttgagccacagccccttcaagtgcagcccatgttttgtaaaccttatcaacagtgtcagtttgaggttttctcagtcggggtcgagggcaccctccaccctgcaacctcatctggccacggctcgagccgtgatgaggatcgtccgcatccaggcctctaggtgatgtcttttgagtcctctcaggggagggtaatcaagattggatctcatatccggggtcatgtaaaaagattgatcaattgtagcaaccgcgtgacagaagggagctccgataagccgaggtccgatcgacgtcaaccacggaaatacatcttctctcccaaatgtgtgttcaagagaaacgttcattgacatattgagtaattcagaggtctgacctcgccactctattatattgaatcttcggccggcggaaggcttggctcgcatgtatcgacattgattgtaa

SEQ ID NO: 77 - DNA, 1236 bp, Physcomitrella patens
atgaacgccttggaggccacgaatttctacttcaagcgcgctgtgaagttgctggggttggattcgaaagtagagcggagcttgctcatcccttttcgcgaaatcaaggttgaatgtactattcccaaagacgatggaactctggcatcctacatcggattccgagtgcagcatgacaactcccgtggccaaatgaagggcggcattcgataccatcctgaggttgagttgaatgaggtgaatgctttggcacagttgatgacatggaaatctgcagtggcgaacataccatacgggggagcgaagggaggcattggatgtaacccccgggatttaagtccaaccgaacttgaacgattaacgcgagtgttcacgcagaagatccatgatgtcatcggtcctcatcttgacatcccagccccggacatgggtaccaatgctcagactatggcttggattttggacgagtactcgaaatttcatgggtatactccggccgtcgtaactggtaaaccggtggacttgggagggtctcttgggcgggaagctgccactggaagaggtgtgctatatgcaacagaggctctgcttaaggatcataacctcagcattaggggccaaacgttcgttgtccaaggctttgggaatgtgggttcttgggcatcgaaacttatccacgaaaagggtggaaaaattaaggctgttagtgatgttactggagccatcaagaacaactctggcattgatataaccgcgcttaatgaacacgtgcggatgaccggaggagtcaaggggtttgaaggggctaatcctttagatgcagctgctctgctcgctgaggattgtgacgtgcttattcctgctgccctcggtggtgtcattaatggtgaaactgccaaggatgtgagtgcgaagttcatcgtagaggctgcaaatcatcctacggatcctgttgcagatgagatcttggcgaaaaggggagtgattattttgcctgacatctatgctaactgtggaggagtgacagtcagctacttcgagtgggttcagaacattcaaggatttccttgggaggaggaaaaggtgaataccaacctgaagaagtacatggagaaggcatacctcagcatcaagagcacttgccaaactcacaattgcagtcatcggatgggtgctttcagccttggggtggggcgggtcgccaaggctactctactgcgtggctgggaagcttga

SEQ ID NO: 78 - DNA, 1236 bp, Selaginella moellendorffii
atgaagccattagaggctacaaatcgatactttaggcaggcagtaaagatacttgggatagattcaaagttggagaggagcctcctgatccctttccgagaaatcaaggttgagtgtaccattccaaaggacgatggcactctgcagtctttcgtgggttttagagtccaacatgacaactcgaggggtcccatgaagggtggcattcgatatcatccagaggctgatccagacgaagtgaacgcactagcgcagttgatgacttggaaaacagccgtagctaatcttccatacggaggcgccaagggagggataggctgtaatccccgggacttgagcatccacgagctagagcggctcactcgaattttcatacagaagatccacaatgttattggtattcatacggatgttccagcacccgacatgggaacgaatgctcagaccatggcttggattcttgacgaatactctaagttccacgggtattcgccagcaatagtaactggaaagccacttgacctcggtggctctgtaggacgtgaggctgccactggaagaggagtcgtatacgtgactgaagcattgcttgccgaccatggcaaatctatctcgaaccaaactttcgtgatccagggatttggcaacgttgggcagcacaccgcccagctccttttcgaggccaaagggagagtgaaggccgttagcgatatcactggagcggttaaaaatgactctggcttggatatcccagcgctgatgaagcacgctcaagaaaatggtggcgtgaaaggcttcaagctgggagatccaatcgacccaagctcaatactaatggaagattgcgatgtgctcatcccggctgccttgggtggcgttcttaatggggagaatgcaaataatgtaaaggcacgattcatcatagaagcaggaaaccatcccattgagccccaggcggacgagatttttgcgaagaaaggcatcattgtgttgccagacatcttggcaaactcaggaggtgtcacagtgagctacttcgaatgggtacagaacaagcaaggcttcatgtgggacgaagaaaaagtcaacatggagttgcagagatacatcaccaatgcatacaacagcgtgaaagagtcatgcaagactcataattgtagccttcgaatgggggctttcacgctcggagtcgaaagagtcgctcgagccacggttcttcgtggatgggaagcctaa

SEQ ID NO: 79 - DNA, 2469 bp, Arabidopsis thaliana
gatttgggatttttctctctttttgttggttttttattattttgcgtctgcaataccaatcgctttggtcgatttatctttatccccgctcaaagctctcatcagaatctgcgaagacaccaaaattatcaacaagttcgagccgaacagactttatgtctctttagtcttaagcgacaattgtctttgtgggtttctctttttcggcgacccgtcgctacaggcaaagttgtcatttcgagcatcgtaccaagtgtaagatacagttgctggtagtcagcaaaagtgaagctaagggggagttaaaactgtgatgctgaatgtttggaccaacaggtgggttggggatgaatccctcaatggatgatatgaacttaatccagcaagcacaaaggcatcagcttgttgtaagtaatcttggggaagagattgatttggaaattggacctggagaggatgatgctgcttttgctaacaattcattgattggcgggcctccacgggagccctccactggggaacatgatgaaacaaagcatatggttttggtatctgaccttcccagtgaggatcaggatatttcaaagggtacaccggcgaagagaaagaaaaaagttgtcaaacggtggagagaggaatgggctgacacgtacaagtgggcttatgttgatatgaaggatggtacagctaggatattctgctctatttgcagagaatatggtagaaaacatcgaagaaatccttacggaaatgaaggaagtagaaacatgcagatgagtgctttagaggaacacaacaatagtttgctacacaaagaggctctgcgtctccaaacggcttccaaagataagattgttgttgacaagcccatttatgtgaagactgtcatgtcaaagagtgctggttcaattgttgagggtgccctgaaacgagatcctaatgaaattgagtttgttcaatctgtacaagaatctgtgcatgctctagagcgggtgattgcaaaaaattctcattatgtcaatatcatggagcggctactagaacctgaacgtatgatagtctttcgagttccatggattgatgaccgtggtgaaacacatgtaaaccgtggctttagagttcagttcaaccaagctctgggtccatgtaggggaggtatccgatttcacccatccatgaacttaagcattgccaaatttcttggctttcagcagacgttgaagaatgctctgtcaccatataaactgggaggggcttctggtggaagcgactttgatcctaaaggaaaaagtgacaatgagattatgagattttgccaaagtttcatgaatgagatgtacagatatatgggtcctgacaaagatcttccgtcagaggaggttggtgttggtactcgggaaatgggatatctttttggacaatatagacgacttgctggtcagtttcagggaagttttacaggaccgcggatatattgggctgcttctagcctcagaactgaagctagtggctatggcgtggtgtactttgcacgacttatacttgcagatatgaataaggaaataaagggactaagatgtgtcgtgagtggttgcgggaagattgcgatgcatgttgtagagaagctaattgcttgtggagcccatccggttactgtttcagattcaaaaggatatttggtggacgatgatggatttgattatatgaaacttgcattcttgagagatataaaatctcaacagagaagtctgagagactattccaagacctatgcaagggcgaaatactttgatgaattaaagccttggaatgaaaggtgtgatgtggcatttccttgtgcttctcagaatgaagttgatcaagcggatgccattaatctggtcaatgcaggatgccgtttactggtagaaggttcaaacatgccgtgtacagctgaagcagtcgatgttttcagaaaggcgaatgttctgattgctcctgccattgctgctggagctggaggagttgctgctggtgaaatcgaagtactccgtgaatctaattcaatgcaatggtcagcagaagattttgagtctagattacaggaagcactgaagcagacttatgaaaaagctcttaaagcagcaaatgatttcggttatcaaaaagaaagtcctgaggcactacttcatggagcaacgattgcagcatttttgaacatagctcaagccatgacggaccaaggttgtgtctagcaaaatggccctgcatcttaagtaccggcaggagttctgtaaacgtaatgaagtaacattggactctctgtaacatattagatggaaatctatatcattatttagaaattacatactctgataggaataaacctttttcagccatagtatgttaacttaagttatgtgactaacaaagatggaagaaactgataacgcagagcttaaacaaggttgcaagggtccaaattttaac

SEQ ID NO: 80 - DNA, 1296 bp, Chlorella
caggacgagttcttggcggcggtcaaggaggtgggcgcctcgctgcagcccgtgtttgaccggcgtcccgagcttctcaaggcatttgaggtcatgtgcgagccggagcgccagatcaccttccgcgtcccctggctggacgacagcggcgtgctgcgcatcaaccgcggctggcgggtacagttcagctccgccattggtccctacaagggcggcctccgcttcagggatggggtgaacctgagcatcatcaagttcctgggcttcgagcagatgtacaagaatgctttgacaacgctgccgatgggggctggcaaggcaagtggtcgcagaggcggctccgactttgaccccaaaggcaagtctgacagtgagatccagcgcttctgccagtcgttcatgaccgagctgtacaagtacatcggcggcaggacggacattccggccggcgacattggcgtgggtgccaaggaaatcggttacctgtttgggcaatggaagcgcctgacgggcctgtggacctcctcactgacgggcaaagggctggactttgggggcagcgaagtgcggccagaagccacggggtttggtgctgtgttctttgccgaggcgatgctggaagacctgggcgatgggctgcaggggaagcgctgcatcgtgtctggcagcgggaacgtggccaccttctgcgcaatgaagctgatcgacaagggcggcgtggtgctggccatgagtgacagcaaaggctacatttacgagaaagatggcttcagtcaggagcagctggaccagatcgtggcgatcaagcgcagccacaacggcagcctggctgagtacacgtctgaaaacgtgcagtattttggggacaggcgaaagccctgggagattgaaacgagcattgacatggccttcccgtgcgctacccagaacgagatcaccctggatgacgcacggcagctaacggacagaggctgcaagtaccccgctgcaggtgccaacatgcccaccaccgctgctgccgtgtcccactttgagcagcacggggtcgtctttggcccagccaaggccgccaatgcaggaggcgtggcagtgtcagggctggagatggtgcagaacagggtcgggctgcagtggacgcgggaggaggtgtgtgagaagttgaaggagatcatgaccaagatctacaccaccatcaagggcgcggcagaggagtatggcaccacgctggccgcaggtgccaacatcgccgccttcaccaaagtggccgaggtggtgctggcgcagggcggggtgtga

SEQ ID NO: 81 - DNA, 1410 bp, Chlorella
atgacggtcacggtggtccagagacatggcggagcaaacggcatcagcttcatgccggagcgcctgcctccactgggcggcgactctgaatacctggagggcatcacacacgagggcctgcgcggtgtgctgcagcaggtgttggagcgtgatggcgcggagcgggagttcatgtctgccgtccacgagatcatcttccgggtgccatggctggacgaccggggccagctgcaggtcaacaggggcttccgcgtgcagttcagctccgccatcggcccctacaagggcggcctccgcttcagggatggggtgaacctgagcatcatcaagttcctgggctttgagcagtgcttcaagaacgctttgacgacgctgcccatgggcggtggcaaggcaagccgcagccgcagggcgggcgggtccgactttgagcccaaggggcgcagcgatgcagaaataatgaagttctgccaaagcttcatgtctgagctgtaccaccacattggccactacaccgatgtgccggctggcgacattggggtgggcgccaaggagattggctacctttttggccagtacaagcgcctaacgcgctgtcacaccggcacgctgacgggcaaggggctggagtggggcggcagcctgatgcgccccgaggcgaccggcttcggcgccgtctactttgccggcgagctgctggcggatgtgggggacagcctgaagggcaagcgctgcatcgtgtctggcagcggcaacgtggcccagcactgcgccatgaagctcctggaggagggagcggtggttctggccatgagcgacagccgcggctacgtctatcaggaggagggtcttacccgcgaccagataatggagatcaaggggcggcgcagcgggcggctggaggagtacacctcgcccactgcgcagtatgtgggcgacaaggggcgccgcgtgtggcagctggccataccggtcgacatggctttcccgtgcgcgacacagcatgaactggaccgggacgatgccgtcgcgctggcagagcacggctgcaagtatgtgtttgaaggcgccaacatgccatgcacccccgccgccaccaaggtcttccaggaccgcggcatcatgtacgggccgggcaaggcggtgaatgcaggcggtgtggcggtgtcggggctggagatgagccaggaccgcatcggcctgcagtggagccgcgaggagcccgaccctgcactccacgagtggctgccggtggtacaggtggatgccaagctgcgtggcatcatgaggagtatctaccagaccgccaaggcggccgccaaggagtatgatgtcagcctggcagcaggtgctaacatagctggcttcctgaaagtggctgaggcacagctggcgcagggcgcggtgtga

SEQ ID NO: 82 - DNA, 1542 bp, Emiliania huxleyi
atgctgcacctcgtgctcgcggccgcctcctggcaaggcgcgcggcccgtggcctctccgcgctccctccgctcctgcgccatccggcagtgcgccgtcggccccctcccgggcagctttgtggtgccaaaggtggatgaagtcgcggcacggcttaagaaggaggcagacaccggtcacgtccccttcaatccggtcgccgaagcagattttgtcgccgagacgctctttgtggcccgccggcacgacgccaacgagggcccttacatccaggcggttcaagaggtcgctgagtctctcgcgccgcttttcgtgcgcgaaccgcactacttttatctcttcaagaccatgctcgaaccagagcggatgatccagttccgcgtgccctggatcgacgacaagggccgcacgagggtgaaccgcggctggcgtgtccagtggagcagcgcgcttggaccctacaagggcgggatgcgcttccacgccacggtcacgtcgggggtcatcaagttccttggctttgagcagaccttcaagaatgcgctcaccggcatgtcgctggggtcgggcaagggaggctccgacttcaacccaaagggcaagagcgaggcagagataatgcgcttctgccagtcctttatgacggcgctcgcgccgcacatcgggcccaaccgcgacgtaccggcgggcgacatcggcgtgggcgccaaggagattgggtatatgtacggccagtacaagcggctcaagcagggcgagttcgagggcgtgctcacaggcaaggatccggcctggggcgggtcgctcatccggcccgaggcgacagggtacggctgcgtttactttgcgcgcgcggcgcttgaggcgcacgggcagcacatcgcgggcaagcgcgcgctcgtctcgggctcgggcaatgtcgcgcagttcaccgccaagaagctgctcgcgctcggcgccaaggtgctgaccttctccgactcggaggggaccgtgcacgagcccgacggcttcaccgaggagcagctcgcccagctcgtcgccgtcaagcagaagcgcggcggccgcgtctccgagtacgcccggctgagcccgaccgccgtcttcctcgacggagagcgcccgtggtcgatcgcggcggacattgcattcccctccgccacgcagaatgagattgacgacgccgacggcgcggccctcgtcgccaacggcgtggtcggcgtctttgagggggccaacatgccatcgaccccggaggccattgcgcgcttcgaggagcgcggcgtcatctttggccccgccaaggcgtccaacgcgggcggcgtggccgtcagcgggatggagatggcgcagaacgcgcagcgtgtcagctgggacgcggagaccgtggaccgggaactgcaggcggtcatgacgaggatccacggcgagtgccacgccgcggcggtcgagtatggtttcggagggaacctgaaggcgggcgcaaacattgcgggcttcaagcgcgtcgccgacgccctccgtgaccagggcgcggtctga

SEQ ID NO: 83 - DNA, 1914 bp, Glycine max
atgttgttgccaaccagtggagtagggatgaattctgcaatggatgatatgaatttgattcagcaaacccagaggcatcacttggttgtgagggagattggcgaggagattgatttagaaataggagctggggaggatgacccgtcatttggtaacgctactctgattggtgcaccaatgcgggaatcttctgtagaagaacatggagagagcaagcagacggggatgatttctcagcttcctaatgatgctcaagatatgtccaagacccaacaggggaaaaggaggaaaaaggttgttaaaagatggagagaagaatgggcagacacctataaatgggcttatgttgatatgaaggatgggacaccaaggattttctgctctgtctgcagggagtacggccggaagcatagaagaaatccttatgggaatgagggcagtcgtaatatgcagatgagtgccctggaagaacacaacaacagtttgcttcacaaagaggctcttcgtcttcaaatggcctctaaagataaaattgtggtcgacaagcctgtttatgtaaaagttgccatgtcaaaaacagcaggatcaattcttgaagctacgctaaaaagggatcctcatgaggttgaattcattcaggcagtccaagaagcagttcaagcccttgaaagagtcatagcaaaaaattctcgttatattaacatcatggagcgcttattggaacctgaacgaatgattgtttttcgagtttcatgggtggatgataggggtgagacatgtgtgaatcggggctttagggtacagtttaaccagtcaatgggtccatgtaggggtggtattcgttttcatccatcaatgaatttaagtgttgccaagttccttggttttgaacagactttaaagaatgccttatcaccatataaattaggaggagcagctggtggaagtgattttgatccaaaaggaaaaagtgacaatgagattatgcgattttgccaaagtttcatgagtgaaatgtatcgctacctggggcctgacaaggaccttccgtcagaggaaatgggtgttggtactcgggaaatgggatatctttttggacagtataggcgtctcgcaggtcattttcagggaagttttacagggccaaggatattttggtctggctccagtcttcgacctgaagccactggctatgggctggttttctttgcccagctcatgcttgctgacatgaataaagaacttaaaggattaagatgtgttgtgagtggttctgggaagatcgcaatgcatgtcttggagaagctaattgcttatggtgctcttcccatttcagtatcagattctagaggatatttggttgatgaggatggatttgactacatgaaaatatcatttttgcgagacatcaaagctcaacaaagaagtttacgagactattcaaagacctatgctcggtccaaatattatgatgaagcaaaaccttggagtgaaaggtgtgatgttgcatttgcctgtgcttcacagaatgaaattgatcaatctgatgccattaatttggttaattctggttgccgtatactagtagaaggttcaaacatgccttgtacccctgaggcagttcagattctgaggaaagctagtgttctcattgctcctgcaatggctgccggtgctggaggggttgtggctggagaacttgaactgaatcatgaatgcagtttgatgcactggtcaccagaggactttgaatctaaattgcaggaagcaatgaagcagacttatcagagagctatgaaagctgcaactgattttggttatcaaaaagaaagccctgaggctctggtacatggagcagtcatctctgcctttctaaccattgctcaagccatgactgatcaaggctctatatag

SEQ ID NO: 84 - DNA, 1356 bp, Oryza sativa
atggccgagcccgagtttgagcaagcctacaaggagctcgcctccacactcgagtcgtccacccttttcgaaaagaaccccgagtacaggaaggccctcgaggttgtttccgtacccgagcgtgttatccagttccgcgttgtctgggaggacgactcgggcaagtgccaggtgaacaagggctaccgcgtgcagttcaactctgccctcggtccctacaagggcggtctccgtctgcaccccactgtaaacctctccatcttgaagttcctcggcttcgagcagatattcaagaatgcccttactggcctcaacatgggcggtggaaagggtggtgccgacttcgaccccaagggcaagtcagacaatgagatccgcaagttttgcgttgccttcatgactgagctttccaagcacatcggtgccgataccgatgttcctgccggtgatatcaacgtgggaggccgcgaaatcggctacatgttcggtcaatatcgccgtctgcgcaaccagtgggagggtgtcttgactggcaagggcctcaactggggtggaagcttgatccgtcccgaagctactggatacggtcttgtctactacgttgaccatatgatcaactatgcctctggaggcaaggagtccttcaagggcaagaaggtggccatctccggctccggcaacgtggctcaatacgccgcccttaaggtcattgaacttggcggtactgtcgtctccctctctgacagcaagggctctctgattgccaccgagggcaagggcttcacacccgaggacatcagccagattgccgccttgaagctgaagcgtcaagccctgactgcgctcgagggccactcttacaactacatcgagggtgcccgaccctggaagcacgttggcaacgtcgatgttgcccttccctcggcgacgcagaacgaggtctcccaggatgaagctgaggctctcattgccgcgggctgcaaattcatcgctgagggttccaacatgggctgcacgcaggaggccatcgatgccttcgaaaaccaccgcaagtcgaacaagggctcctccatctggtacgctccgggcaaggctgctaatgctggtggcgtcgccgtttctgggcttgagatggcccagaactcccagcgactatcctggaccaacgaggaggtcgatgctaagctcgctaagatcatgaaggactgcttcgagaactgcctcgccaccgccaaggaatacatcacacctgccgagggcgagttcccgtcactcgttgccggtgccaacgttgcaggcttcaagaaggtcgccgctgccatgcacgaccaaggcgactggtggggtactgcttag

SEQ ID NO: 85 - DNA, 2645 bp, Oryza sativa
gtcggaaactgcctccatttcttcactacccctccgcgacacaatctccggctgccgcgctagttgattccccctcgccgtcgccggccacctcgccgccgccgccgccgccgccgccggggaggtccctccccacgccgttctctgcgcccccccagatcgaggccttgctcgatcgaagaccttagccggcgcagccgcggaggtggcgcgcggtgcctgattccccacccaaccaaaccctagagcccaaatccggagggcggggatttgcgccgccgcgggctggtgcgagtctcctccagggcgtggtccccctcatggcgcggcggcgcacgtgcgggtgagctcgggccaccaggccatggacgagctcaacctattgcggcagcaccagcaccagcaccagcaccacctggtggtgcgcggcctcggcgaggagatcgacctcgagatcggcccgggcgacgacccctccttccccggcgcggccctcgtcggcgtcacccccggcgcgcacgaccccgcggacgaccacaagagcctcctcatcccgtgctcgcagcccgtcgccgaggggcagccgcagccgacgccgccgcaggtggaggagcacgacgggctgctacggctgccggggcaaaccaagaagaagaagaaggtggtgaagaaatggagggaggagtgggcggacacctacaagtgggcctacgtcgccgtgcacgacaacaccagcaggatcttctgcaccgtgtgcaaggagtacgggcggaagcaccgccggaatccctacgggaacgaggggagcaggaacatgcagatgagcgcgctggaggagcacaacaacagcttgctgcacaaggaggcgctgcggttgcagacggcgtccaaggagaacgcgcagccccctgagatcgagaggccggtatatgtcaaagctctgtcgaaaactgcagcctctatacttgaatctatcctaaagaaggaccctcatgaagctgagtttatacagtctatccaagaggtggttcattccttggaaccagttttggtgaagaactcccaacatgtccaaattttggagcgtttgttggaacctgagagatgctttatcttcagagtgccatgggttgatgatagaggtgaagcacatgtaaatcgaggcttccgtgtgcagttcagtcaagcgttaggtccatgcagaggtggtcttcgtttccacccttccatgactttgagcgtagcaaaatttctagcttttgagcagactctaaaaaatgctttgtcacaatataaacttggaggagctgctggagggagtgattttgatcccaagggtaaaagtgaaagtgagataatgcgtttttgtcaaagtttcatggatgagctgtatagatatttggggcctgatcaggattttcctgctgaagatgttggtgtgggtccaagagaaatgggttatctttttgggcagtatagacgcctttctggtcattttcaggggaattttacagggcctaaaatcttctggtctggttctagtttccgaacagaagctactggatacggactggtattctttgcacgtgtagtgcttgctgatatgaacaaggaactcaaaggattaagatgtgtgataagtggttctggaaagatagcaatgcatgtattggaaaagcttctgtcatgtgaagctattcctgttacagtttcagattcgaagggttatttgttagacacggaagggtttgattacatgaaatattcagttctaaggaacatcaaggctcagcaaaggagcctcaaggaatacttgaaatcatatccaaatgccaaatatatagatgatgcaaagccctggagtgagaagtgtgacgttgcattcccttgtgcatcacaaaatgagattgaccaggcggaggctcttgcaataattaactctggctgccgtgttcttatagaatgttcaaatatgccttgcactgctcaagcagttgatatcctacgaacagcaaaagtagttgttgctcccgcaaaggcaactgccgctggtggggtagcagttggagaactcgaactgaaccctgagttcagtttgatgcagtggtcagtggaggattttgagaacaaaatacaggatgcggtgaaacaaacatatgacagatctatcaaagctgctcaagattatggaatcatgaaagagaacccagagtcgttggtgcatggtgcaaacatatgtgcgtttcttaatattgcacaagccatgactgatcaaggatgtgtctagtgaggctgctcaataagcagaaatggcgattgttgcagtcctgcaggcatgatctcacgggagcataggtttttgtttatacatgccctcaaatcaatttagtgttgaaagctttcccctggtaggaagcgaagcttgggcccatcgtagaacaatatagaagagccctttgttgttgtatgtagtctcgtagatcaccgatgtattatccattctttcttttttttttctttttgaactatgtattgcccactcttaccaacatcaatgccaatgggaggaggaaatagaagcaattctttttgtatctagatggtgtcatctgaatgaaagtaatttatcaggagttaatcataca

SEQ ID NO: 86 - DNA, 1737 bp, Physcomitrella patens
atggaggagattgatttggaaattggaccagggtacgacgatgcaacgcacttcgaccctggggcaacccaaaatctggcactcatcgctgtaaatgatcatggaatgaaaccaaccccgcggaagaagaaaaaagtggtgaagaggtggcgcgacgagtgggcagagacatacaagtgggctcacgttgcagttcacgagggctctcatcgcatattttgctctgtatgcaaggaatatggacggaagcatcgacgtaatccttacggtaatgaaggcagccgcaacatgcagatgagtgctcttgaggagcacaataacagtctgctgcacaaggaagctctccgcctgcaaatggcttcccgcgacaaaggattgggatttatcgagcggcctctctatgtaaaggtagcatttattgtagcagcgatcttgcggcgggatccgtatgaagttgaatttatacaatcggttcaagaagttttacattcattggagcctgttcttgcgaaagttccgcagtatgtacatgtgttagagcgactggtggagcctgagagggtggttattttcaaagttccttgggtggacgataagggagaggcacatgtgaaccgtggcttcagagttcagtttaatcaagcccttggtccttacaaaggcggccttcgctttcacccaactgtcaatctcagcgtcgtgaagttccttgcttttgagcagacactgaagaactcgctatcatcactcagcttgggtggcggtaaggggggcagtgacttcaatccgaaaggaaagagtgagaatgagatcatgcggttctgttatagttttatggatgaactgtacaggcacattggacccaatcaagatactccatcaggagatattggtgttggaccacgtgagatcggttatctatttggccagtataggcgcctgactagtcaatatgagggtatgttaggtcctaaaggcattcaatggggcctgtcaaatctgcacccagaggctactggttatggcgtggtgtattttgccaaggaagttcttgccaatttagagaaagatttgaaagatctcaggtgtgttgtgagtggtgccgggaaagtggcattatatgcagtggagaaactgattgcatttggtgctgttcctattacaatctcagatacaagaggttaccttttagacgaagatggatttgatcgtaccaagcttgggctcattcgtgaaataaaagctcacaataacagcctgggggaatacaccaaactttacccaagagcaaagtattttgacgacatgaagccctggacagtgaagtgtgatattgcttttccttgtgcaacacagaatgagctgaatcatgctgatgccatgtctctcattaatcttggatgtcaagttattatagaaggggccaacatgccatgtacagctgaggcgatcgatgtatttcggaagtcaaaagtctggtttgggcctggaaaggctgcaaatgctggtggggtaactattcaaggtttggagatggcacaaaacacatcctatgttcagtggacagctgaagaagttgacatgagattgcaagaggtcatgagggatatacatcaaaagattatcaaggctgcccaagattatggaattggcaatccagaggcactacttcacggtgctaatattgcaagttttctacgtgttgctcaagcaatgttggaacagggctgcgtttga

SEQ ID NO: 87 - DNA, 1976 bp, Populus trichocarpa
ttgattatatggtaacgctgaattttgctaatggaagttagtgggtggttcaaagctgaggggataaggatgaattccacgatggatgatattaacttgattcagcaagcacagaggcatcatttggtggtcagagagcttggagaggagatcgatttggaaattggtcatggagatgatgaccattcatttgctaacactcctattatgggtggtcggccacgagaacattctgctgaggacaatgatgaagtcaagaatatgatggcttcttctcaattttcaaacgaagaacaagatgtgccaaagacacaaccagtaaagaggaagaaaaaggtggtcaaaagatggagagaggaatgggcagatacctacaagtgggcatacgtggatgtgaaagaaggaactgcaaggatattttgctctgtttgtagagagtatgggaggaagcatcgaagaaatccatatgggaatgaaggcagtagaaatatgcagatgagtgcactggaagagcataacaatagtttgcttcacaaagaggctcttcgtctgcagatggcctccaaggataagattgtggtcgataaaaccatttatgtaaaagctcttatgtcaaaaacagctggatctattgttgaagctgcacttaaaagggaccctcatgaggttgagttcatacaatcagtgcaggaagctgttcatgctttagacagagttattgcaaaaaattctcattacgtcaacatcatggaacgcttattagaacctgaacgcatgcttgtttttcgagtgccttgggtggatgacaggggtgagacacatgtcaatcgaggttttcgggtgcattttaaccaggcattgggtccatgtaggggtggtattcgtttccacccatcaatgaacttaagcattgccaagtttcttggttttggacagacattaaagaatgccttatcgccatacaggctaggaggggctgctggtggaagtgattttgatccaaaaggaaaaactgacaatgaggaccttccatcagaggagatgggtgttggtacgagagaaatggggtatctacttggacaatatagacgcttagcaggtcattttcagggaagttttacagggccaaggatattttggtctggctctagccttcgaactgaagctactggctatgggttggttttctttgtgcagcttatgcttgctgacatgaataaagaaatcaaaggactaagatgtgctgtaagtggttctggaaagattacaatgcatgttctagagaagcttattgcttatggcgcccttccgatcacagtatcagattcaaagggatatttggtggatgaggatggatttgattatgtgaaaatatcttttctcagagatatcaaagcgcagcagagaagtttgagagactactcaaagacttatgctcgttctaagtactatgacgaagcaaaaccttggagtgaaaggtgtgatgttgcatttccttgtggttaccagaatgaaatcgatcaatctgatgccatgagtctggttaattcaggctgtcgtatcctcgttgaaggttcaaacatgccctgtactcctgaagctgttgatgttttcaaaaaagccaatgttctcattgctcctgctatagcagctggtgctggaggggttgttgctggggagcttgagttaaaccatgagtgcaatttgctgaactggtcacctgaggactttgaatctaaattgcaggaagcaatgaaacagatctaccaaagagccctgaaagcagcaaacgattttggctaccaaaaggagagtcctgaggcgttggtgcacggagctgtcatctctgcttttctaaccattgctcaagctatgtctgatcaaggatgcgtatagaagtcaaggataacatataattcacatgcttcactaaagttatatgatctctgaaggcggcactccttggcataaagaag

SEQ ID NO: 88 - DNA, 1353 bp, Phaedactylum tricornutum
atgtccacacgcggtgatctagactttctcgatgatttgcgccgaaagtatccgcaccaaccaacgtttttgcaggcagttgaagaaatggccctcgccctcagcgatctttttgatggaccggacggagatttttaccaaagggcctttctggccatggcggagcccgagcgtatcattgcctttcgcgtttcttggatggatgataacggaaagattcgttttaaccgtggatggcgggtccagtttagcagcgttctcggtcccttcaagggcggtcttcgcttccacccaactgtcgatgaaggagtcttgaagtttcttggcttcgagcagatcttcaaaaacgctttgaccggattgccgttgggtggaggtaagggcgggtccgactttgaccccaagggcaaatcggacggggaagttcgtcgtttttgcgaagccttcatgtccgagctttgccgttacttgcatccatccacagatgttcctgctggtgatattggagttggtggccgcgaaattggctacatgtatggacagtataagcgtataacaaatcgccacggtgtcggtgtcctaacgggtaagtccatgaactttggtggcagcgaaattcgccccgaggcgaccggatatggtcttatttacatgacaaagattgccgtccaaaggaaactgaaccgaaacttgacggacatgcgctgtgcaatttccggttcgggaaatgttgcacagtttgcggcgaagaagttgctcgagtttggtgccaaggtcatgactgtgagtgactccaacggtgtgatcgttttcgagagcggaatgacggccacagactgggatgctgtttccgactgcaaaaataagcaccgcggacgtctttcgtccatccaggacaaagtcagcgggcagtattacgacggcgaaagtccttggagtttagacatcaagtacgacttggccttgccttgtgctacacaaaatgaaattgacgagaagtcggccaggcaacttgtaaaaaacggagtgttgggagtgttggagggcgcaaacctaccgaccgacttggaggcgcaggccgtgttccgtaaggccgacggtgttatttatgtcccgggaaaggcatccaatgctggaggtgttggtgtcagtggtttggagatgagtcagaacgcacagcggctcacgtggaaatcagaaaaggtggacgaaaaactgcatggcatgatggacgagatttacagtatgatggaagaagccgaactaagtggaggaactttggaacagggagcaaaccgtgctggatttctgaaggttgccacggctatgagagagctaggttgggtgtattga

SEQ ID NO: 89 - DNA, 2509 bp, Sorghum bicolor
agtctccgctggctgcggcttcacggacgctccctgtcctcctcctcctcctcctcctccttcctgatcgaacccgctttatctccgtcagccggactcgccgaattctccaaaccctagcgccaaaatccccactccggtagccgcaatcggagccggattctctcggtttccggctggcgccggtatcgcgtgcgtctgcgcatgatgcagcgagcgcgctcatgaactcgatggacgaaatcaacctgcttcggcaggcgcagcggcagcatcagcaccacctcatggtgcgcggcatcggcgaggagatcgacctcgagatcggccccggcgacgacccctcgttctccggggcttccttagttgccgtcacgtccacgcacgacgccgtcgtccacgccgacgaccacaagagcctcctcatcccgtgttctcagaccggcgcggcggacgggctggcgccgcagcagcagcacctggcgcagggggaggaagagcatgacgggatgctcaggcagccgtcggggcacaccaagaagaagaagaaggtggtgaagaaatggcgggaggagtgggcggacacctacaagtgggcctacgtcgccgtgcacgacaacaccaccaggatcttctgctcggtgtgcaaggagtacggccggaagcaccgccggaatccatatggcaacgagggaagcaggaatatgcagatgagtgcgcttgaggagcacaacaatagcttgttgcataaggaggcgctccggttgcagatggcctccaaggagaagttgcagcctcctgagatcgagaggccggtctatgtcaaagctttatcgaaaacagcggcgtcaatacttgaatgtgttctaaggagggatccccatgaagctgaatatatacagtccatccaggaggtggttcattccttagaacctgttttggtgaagaatacccaatatattcaaattttggagcgtttgttggaacctgagagatgctttattttcagagtgccatggattgatgacagaggtgaagcacatgtcaatagaggtttccgtgtgcaattcagtcaggcgttaggtccatgcaggggcggtcttcgatttcacccatccatgagcttaagtgtggcaaagtttctggcctttgaacatactttgaagaatgctttgtcactatataaacttggaggtgctgctggaggaagcgattttgatccaaagggtaaaagtgataatgagataatgcgcttttgccaaagtttcatggatgagctgtatagatatttgggccctgaccaggattttcccgctgaagatattggtgttggtccaagggaaatgggttacctttttgggcagtatagacgtctttctggtcattttcagggaaattttacaggacctaaaattttctggtcagggtcaagttttcgaacagaagctactggatacgggctggtgttttttgcgcgtattttacttgctgaaatgaacaaagagcttaaaggattaagatgtgtgatcagtggttctggaaagatagcaatgcatgttttggaaaaacttttgccttgtggagccattcctgttactgtctcagattcaaagggatatttgttagatgaagatggattcgattatatgaaatattcacttctaagggatattaaggctcagcaaaagagcctcaaggagtacttgaaatcatatccacatgccaagtatattgatgatgcaaaaccatggagcgagcagtgtgatgttgcattcccttgtgcatcacataatgagattgaccaaggggaggccgttgcgatcatcaactctggttgtcgtgttcttgtcgaatgttcaaatatgccatgcactgttcaagctgttgatatcctaagaaaggcaaaagttattgttgctccagcaaaggcaactgctgctggtggggtagcacttggagagcttgaattgaatccagagtttaatttgatgcagttgtcagtggaggattttgagaataaaattcaagatgcaataaagcaaacatatgaaaggtcgatcaaagctgctcaagattacgggatcatgaaagagagccctgagtctttggtccatggcgcgaacatttgtgctttccttaatattgcgcaagccatggctgaccagggatgtgtttagttaggcctttgattctgtcaagaagcttcaactggagcttcctgcaactgcgaggaggaaaaaaaaatcttctgatgactagaagtgtttcgatgcttaaaccttgagtagtgctgcacaaatcatgaagcgctacaaaacagggagtaactgggattcattcacccttgtttatgctagaaatgtgtacaactaaggtgccggaaagaaagccagttttgtggttcaattaagaagagctgaggatgtagatcaccggagtatcatccattgttatgtacgtaaatgtcaatggaaggttgataggaagcaactcatttgcatgcaaagcc

SEQ ID NO: 90 - DNA, 1905 bp, Selaginella moellendorffii
atggatcttctcggcggccaggtgagatcgcccgggaatcaccaccaccaccacggcctgggcggcgcggtggaggagattgatctggaaatgggggccgcggcgggggttgtggacgatgcgagcttcgcgcgggcggcatttgcggtggtgtcctcgtcgcccgaggcgtctgcgaatcagcaggcgatgcatcacgtcctggatggatcgccgtcgtcgcaggagctatcggcgcagctcttgtcgtcggacaagccccggaagaagaagaaggtcgtcaagaaatggagggacgagtgggccgacacgtataagtgggcttgcgtgcaaatggtggaaggctcgtccaggattttttgctcggtgtgtaaggagtatggacgcaagcacaggaggaatccttatggcaacgaaggtagtcgcaacatgcaaatgagcgctctcgaggagcataacaatagtttgcttcacaaggaggccttgagattgcagctagcgtcgaaagaccggggaattacgctcttggagaggcctatatacatcaaagctcttctctccaagagcgcagagtcgatcatagagactgtcattagaagggatcctcacgagagtgaatacatccaggctgtgcaagagattgttcactcgctcgagccggttctctccaagaacatccagtacctccacgtattggaaagcctcttggaaccagaacgagtgattattttcagagttccatgggtcgatgacaagggagagaagcatgtaaaccgggggttccgtgtacagttcaatcaggctctcggaccttataagggtggtcttcgtttccatccgtctgttaacttgagcgttctcaagtttctaggcctcgagcaaactttaaagaatgcgctctcaacattcagtttcggtggtgctgagggtggcagtgactttgatccgaagggaaagtcagacaccgaggtgatgagattttgccagagctttatggatgagctttttcatcacatcggtcctaatcaggatacgctaactggagatattggcgttggattccgggagcttggttatctctacggacaatatcggcgactgactggagaatttgagtgtgctttagttggaggccggaacttgcttgcaaactccaatttacatgcagaagctgctggtcatggcctggtgtattatgccaaacatgttctggcggacttgaacagggatatcaagggcttaaggttgtgccttatcagtgggtcgggtaagcttgcgatgcacgtcatggagaagcttatagctgtaggagcggtccccgtttccttatctgattccaaaggttttttacttgacgacgaaggattcgatgggtccaaagccatgtttctaaaggacatgaagtcgcagcaaaagcctctgagggagtatacaaggagatacgtaagagcgaaatattttgacgatgccaggccttggggcgagaaatgtgatctcgcattcccttgtgctacacagaacgagcttaaccattctgatgcactggcaattatctcttcaggatgtcatgtaattgtggaaggttctgatatgtcttgcacggcggaagctatcgacgtgcttaggaagtcgaagataatcgtggctcctagcaaagctgcaaatgctggaggagtagcggtttcggggctggagatggctagcaaaagcaaccaaatgcattggactggcgaagaagttgataccaagttacaggagctcatgagggacatctatcaaaagtccgtggcagcagctgcagcgtgtggccactctaaagatgggccagaagctctagtccacggtgccaacgtagctggattcttgcgtgtcgcgcaggcgatgcttgagcaaggatgcgtgtaa

SEQ ID NO: 91 - DNA, 2356 bp, Vitis vinifera
caacagagtggataattttggggtgtggttaagattgtcatgctgaatgttgctaccggtcggtggattggggatgaattccaccatggatgacatgaacttgatccagcaaaggcatcacttggtggttagggagcttggagaagagattgatttggaaattgggcctggggatgatgatccatcatttgcaaatactcctctcattggtggccctccacgggaaccttctgctgaagagcatgatgagagcaagcaggttgtaatggtatctcaactctcaagtgaagaccaggatgcgtcgaagatgcaaccagtgaaaaggaagaagaaggtggtgaaaagatggagagaggaatgggctgatacatacaagtgggcatatgttgatgtgaaagaagggacagcgaggatattttgctctgtttgccgagagtatggtaggaagcatagaagaaacccatatggaaatgagggcagtaggaatatgcaaatgagtgcactagaagaacacaataatagtttgcttcacaaagaggctcttcggctccaaatggcatccaaggataagatcattgttgacaagcctatatatgtaaaagctcttatgtcaaaaacagctggatcaattgttgaagctgcattaaaaagggatcctcatgaggtcgagttcatacagtcagtgcaagaagcagttcatgctttagaaagagtgattgcgaaaaattctcattatgtcaacatcatggagcgtttgttagaacctgagcgcatgattcttttccgagttccatgggttgatgacaggggtgagacacatgtcaatcgaggtttccgcgttcaatttaaccagacattgggtccttgtaggggtggtattcgttttcattcatcaatgaacttaagtattgccaagtttctcggttttgaacagactctaaagaatgccttgtcaccatacaaactaggaggggcagcaggtggaagtgattttgatccgaaaggaaaaagtgataacgagatcatgcgcttttgccagagttttatgaatgagctatatcgttatttgggaccagaccaggatcttccttcagaggagatgggtgttggtcctcgagaaatgggttatctctttggacaatatagacgcctagcaggtcattttcagggaagttttacagggccaaggatattttggtctggctctagcctccgaactgaagctactggctatggactggtttttttcgcccaacttatgcttgcggacatgaataaagaactcaagggattaagatgcgtggtaagtggttctggaaagattgcattgcatgttacagagaagcttcttgcatatggtgctcttcctatcacggtatcagattcaaagggttatttggtggatgaggatggatttgattacatgaaaatatcatttttgagagagatcaaaagtcaacaaagaagtttgagagactattcaaaaacttatgctcgatctaagtactatgatgaagcaaaaccttggagtgaaaggtgtgatgttgcatttccttgtgcttctcagaatgaaatcgaccaatctgatgccataaatttggtaaattcaggttgccggatactaatagaaggtagttcaaacatgccctgtacccctgaagcagttgatgttttgagaaaagcgaatgttctcattgctccagcaatggctgctggtgctggaggggttgctgctggagaacttgaactaaaccatgagtgtaatttgatgcactggtcccctgaggactttgaatctaaattacaggaagctatgaagcagacgtaccagagagctctcaaagcagcagctgattttggttatcaaaaagagagtcctgaggctttggtgcatggagcagccatctctgcttttctgactatcgctcaaggaatgaccgatcagggatgtgtataggatatggatattgaggaggaggtcatttgcatgctcctcatgactttccagattaaacacctggagccattcacccatcggcagctgctaatcctggtgtactgtcatgtgggtattaaagatgccataagcagatacgaccaagtattggaatatgaccggagataacttcatgtaacatatgtaatgttatagctaaggcttgaaataggataatccatgaggattgattggaaagatataactatgaagatgttaatgtagtggaataggaaggcccctgtgcctttaggatgtatgaaatattagcaacccatttgagatgtccagatgcttattacaaccttgtgaaaaagctggatcatgggtttggaaataaaattttattcttttgtgaat

SEQ ID NO: 92 - DNA, 2096 bp, Chlamydomonas reinhardtii
tgcacattcgtccggttgagctcgtataacacatctattcactcgttttcaacatacgtctggcgttaccgaacctctttcgcctgcgagctgcgtaaacaagaggccagccctggtcgggggagtttgcgcaggctggccacatggcatcggcgttgttagcttgcgggcggcagctcagctgcgcgctgggcgggctgtcgcttggccaccaggcccttggggcaattggcggagcttttcgacgccacgccagctcgcacgccgagaacacgaacacgtttttaagagaggcgcttgtgaagctggactacccggagaagctccagaacctgctgctcaccccccgccgcgagatgagcgtggagctggtggtgcagatggacgacggccagattgaggtgttcaacgcttaccgcgtacaacacaacaacgcccgcgggccctacaagggcgggctgcgctaccacccgcaagtggacctggacgacgtgcgcagcctggccagtcttatgacttggaagacggctgtgatggacatcccctacggaggcgccaagggcggcgtgacggtggacccgcgcaagctgtcggagcgcgagctggagaagatgacgcgcaaactggtggtggccatcaaggagatcatcggcacctacgaggacatccccgcacccgacatgaacacggacgccaaagtgatggcctggttcttcgacgagtactccaagtacaagggcttcagcccaggcgtggtcaccggcaagcccgtgtaccttcacggctctctgggtcgcgaggccgctacgggccgcggcaccacctttgccatccgggagctgctcaaggcgttgcacatgggcaagatcgcggaccagaagtacgtcatccagggctttggcaacgtgggcgcgtgggccgcgcagctgctgtgggaggcgggcggcaaggtggtcgccatcagtgacgtggcgggggcggtgcacaacgagcaggtgcgtggtctggacattggcgcgctgcgcaaacacgtggcgagcggcaagcccctggccgagttcacaggcggcgccgccgtccccaagcaggacatcctgctgcacccgtgcgatgtgctcatcccggccgccatcggcggcgtgatcgggccggaggaggcgaagaagctgcagtgcaaggtggttgtggaggctgccaacggccccaccacacccgagggcgacatggtgctgcgggaccgaggcatcaccgtgctgccggacatctacaccaacggcggcggtgtgacggtgtctttcttcgagtgggtccagaacctgcagaacttcaagtgggaggaggacgacgtcaacaggaagctggatcgcaagatggcggacgccttcgcggcgctgtgggcggtgcacaaggagatgaacgtgccgctgcgcaccgcggcctttgtggtggccttacagcgcgtgacgcgcgccgaggtgcaccgcggcttcgactgagagcgctgctattgctgttgccgctgctgggaagcggctggcggattagcttgggctcggttgctgcgctggtgtttggtctggtagcttcgggggttggggagatggggcgctgaatacggacatggtatataggagcgcctgggggcgggggatgcctagggcacgcggaaggaagtcaatgaagacgggagatcaggggcggcttaacaacagcttcttcagggataacacagttggcaacggacccagggcatatgggtattcggtgtggtgtgggtgacatgatgatggtgttgataatgtggactcgcagagccaggcgatagctcagtcaaatctaatggctatgcatgcgatgtgacatcacttcacatgtatatagttcatttcagcgcaatgcttggatcccgaggatagaagcggatatgggggcaatccgggtgctgcggaaggccgtgtcagtaaacgtagcgtggcgtgtcccatgcaacactcgtcaatgtcatggagatttggataaatgacgagccgcatatgagctggcattatcgggtactcgcgtgtaacacatactgcatgcagtatacacttgccaaa

SEQ ID NO: 93 - DNA, 2114 bp, Chlorella
tgacattctgggctgcactagagcactcggcagcctcgttcccctctttgccgggcggcggaaaagtcttccgcctgtcaaaccacccccccgccagcgttggcattccctatctgcagcagcatcaatggctcttgcgcttggcaggctgcagggcgccgggctgtcacggttgttgccgtcggtggcagctgggctggagacctgcggcgcccgcagggccacggatggcgcagagctgcaccagcggcgcaccaagatgtcgcactcggaggccaccaacttctacatcaatgaggccctggagcacctggagtaccccaagcgcctgcgcaagctgctgctcaccccggagcgggaggtggcggtggagctggcgctgctgcgggacaatggcgaggtggccaccttcaacgcctaccgcgtgcagcacgacaacagccgcgggccctacaagggcggcctgcggttccatcctgacgttgatctggacgacgtgcgcagcctggcctccctcatgacctggaagacggcggtgatggacatcccctttggcggcgccaagggcggcgtgtgtgtggaccctcgtgacctcagcgagcgggagctggagatcctgacccgcaagctggtgcaggcgctgcggcccatcctgggcacttatgaggacatccccgcccccgacatgaacacgggggcccgcgagatggcctggatctttgacgagtacaccaagttcgccggcttctccccgggcatcgtcaccggcaagcccgtgtggctgcacggctcgctgggccgcgaggcggccaccgggcgcggcaccgtctttgccatccgggagctgttcaaggctcaggggctgggagagatcaagaacaagagctttgtgatccagggctttggcaacgtgggctcctgggcggcccagatcctttacgagatgggcggccgtgtggtggcggtggccgacgcctttggcgctgtggccaacgagcacggcctggaggtgcccgagctgcggcgccacctggcggacaggcacagcctggcctccttctccggcggcgtggtgctgcccaaggaagccatcctcaccgtgccctgcgacgtcctcatccccgccgccatcggaggcgtcatcacagaggagaatgcggcagacctgcagtgcaagatcgtggtggaggcggccaacggccccaccacgcccgaggcggaccagatcctgcgccagcggggcgtgaccgtgctgcccgacatctacaccaacggcggcggcgtcaccgtgtccttcttcgagtgggtgcagaacctgcagaacttcaagtggagcgaggaggaggtgaacagcaagctggacagagtcatggtggaggcgttccagggcatctgggagctgcacaccgaggacaagatcccgctgcgggtggcggcatttgtcaaggcgctgcagagggtgacgcgcgcccgtgtgcaccgcggctttgactgaggccgcgggcccgtgctagccaggcaggccgccgccgccgccgcccgcttggttccagccgctgccgctgggagtggctgccagtgctgggctcctggcggcggccagcagtaccaaacttagtcaggccacaccctgcttttgtttcgctagctctcgtgcttgctcgcctcctcgattcccacctccctctattcacctctctcgcaactgaaatgtgctctgatgctggcgcgccccgttgttcgctgctctgcactgcttctcactccccaggctatcccgtatttttttccaatccatttggacggtcggcaggctgccgtggaacaaccatcgtaaggaaagcagcatgcgaggagcactgcttgaccgaatcacagcgtgccgttgagccaggccaggcggttgtcgcccgcggtgccgctcggctcaaagccttgaggcccatccccaaacaggtggcacctcttgtgggcctcctctaccggcgccagcgtatcggcgctgcccagcttgggcaccgcccctaggaacagcaccggccagtcggcaaacgctgccgccgcctccaccaccgcctctgcgtcaggcacctcgacctcgggctgcggcgcgg

SEQ ID NO: 94 - DNA, 1431 bp, Chlorella
ccgtttagagctacattcaccaaactccgacatccggtctccatgacgccggccctggcgatgccgccgctgccgctggacctgcatgccgccgaggagatgcaggtcgagggcgagtggaaggtggccgctgcgccgccgtccaacccggcgtcggctcgcaagctggtcatgcgcactccccgccagcacgcatctgccgccgccaacaccaacaagttcatctgcgaggccctggagcatctggacctggccccctcccagcgccgcctgctgatgagcccgcagcgcgaggtggcggtgacgctgagcctgctgcgcgacagcggcgaggtggccacctttgacgcctaccgcgtgcagcatgacaacagccgcggccccttcaagggcggcttgcgcttccacccacacgtcgacctggacgacgtgcgcagcctggcctccctcatgacctggaagacggcggttatggacatcccctttggcggcgccaaggggggcgtgtgtgtggacccgtctgagctcagcacccgcgagctggagatcctcacgcgcaagctgacccaggcgctgcgccccgtgctgggtgaccacaccgacatccccgcccccgacatgaacacgggcgcccgcgagatggcctggttcttcgacgagttctccaagaccgcgggcttcacgcccggcatcgtcacgggcaagcccgtgtggctgcacggctcgctgggccgcgaggcggccaccggccgcggcaccgtcttcgccattcgggagctgctcaaggcgcaggggcagggcgagattgcgggcaagagcttcgtcatccagggctttggcaacgtgggctcctgggccgcccagatcctgcaccagcagggcggccgcgtggtggcggtggccgacgcgtttggcgctgtggccaacctggagcgggggctggacatcccggcgctgtgccagcacctggccgccaagggcggcctggccgccttccccggcggcaccgagatggccaaggaggcgatcctggcggtgccctgcgacgtcctcatccccgccgccatcggcggcgtgatcacagaggacaatgcccacaccctgcagtgcaagattgtggcggaggcggccaacggccccaccacccccgaggcggacgccgcgctgcgccgccgcggcatcgccgtgctgcccgacatctactgcaacggcggcggcgtgacggtgtcctactttgagtgggtgcagaacctgcagaacctgcggtggagcgaggaggaggtcaacagccggctggaccgcgtgatgacggatgccttccgtgccatctggcagctgagccagcgcgactctatcccgctgcgcgtggctgcctttgccatcgccctggagcgggtgatgcaggcccgcatgaaccgcggcttcgactga

SEQ ID NO: 95 - DNA, 1218 bp, Volvox carteri
atggccgcgagcttatcccagtttcgctacgcaagctcacacgcggagaacacaaacaagttcttgcgagaggcccttaatcggctggattatccggagaagctgcagaacctgctcctgacaccccgacgagaaatgagtgtggagctagtcgtgcagatggacgacggaaaaatcgaggtgtttaacgcctaccgtgtacagcacaataacgcacgggggccgtacaagggcggtctgcgctaccacccacaggtggacctggacgatgtgcgcagtcttgcgagccttatgacctggaagactgccgtaatggacattccgtacggcggtgccaaggggggcgttacggtggaccctcgcaaactgagtgagcgggagctggagaagctgactcgcaaactggtggtcatggcttggttctttgacgagtactccaagtacaagggcttctctccaggggtggtgactgggaagccggtgtacctgcacggctcgctgggtagggaggcggccacgggccggggaaccaccttcgccatccgggagctactcaaggctctccacatgggcaaactggctgaccagaagtacgtcatccagggtttcggcaacgtgggctcgtgggccgcccagctgctgtgggagtcggggggcaaggtggtggcggtcagtgacgtggcaggagcagtcgccaacgaaaacgtgagtgggcgtgcttgcggtctggatattggggagctccgcaagcatatggctgccggcaagacgttggcctccttccccgggggagttgcgttgcctaaagaggacatcctggcacagccctgcgacgtgctgattccggcagccatagggggggtcatagggccagaaatggcggccaggttgcagtgcaaggtggtggttgaggccgccaacggtccaaccaccccggagggagatctggtgctccgagaccggggtatcaccgtattgccggacatctacaccaacggcggcggagtgacggtgtcctttttcgagtgggtccagaacctgcagaacttcaaatgggaagaggaagatgtcaacaggaagctggaccgcaagatgacggacgcgttcgctgcactctggggtgttcacaaggagatgggtgtgccgctgcgtacggcagccttcgtggtggcgctgcagcgggtgacccgagccgaggtgcaccggggctttgactga

SEQ ID NO: 96 - DNA, 1365 bp, Volvox carteri
atggaaagggctgtcgctagcatggcagggcttgcaagaagctgtcgggcgctgggcgctgctgcgtcgacgagcttgcagcacttctgcacaactactacaccaacatatggccgaacgtctgtgtacgtgaaggaggcgagtgaagctgccttcaatatcctggactttgacccccaagtggagaaggccatcctgaatccggatcgagaggtcaaggtcaacctggtggtccccatggacaacggggaggtcaacatgtacgacgcatatcgtgtacaacacaataacgtactggggccgttcaagggcggcatcatattccacccggcagtcaacttggagaacatgcgcagcctggcctccctcaacacctggaagttcgccttgctcaacgtccagtttgggggcagtaagggcggagtggcggtggacccgaggacgctgacggaccgggaggtggagaaactgacacgcaaatacgtgcaggcccttcaggaggtgattggtcctcgtacggacattccagctccggacatcaacacagacgaacggcacatggcctggatatttgaccagtactcgaaactccgaggttttacgccggcggccgtgacaggcaaacccacatggctgcatggcatcgtgggacgtgacagtgcggggggccggggggcggcgtacagcactcgcgagttcatgacacgaaccctccgacgcaaggttgcgggaagcagctttctgatccagcagggcttcggcaagttgggcagctggacggcacagatcctccaacaagaactgggtgccaagattgtgggagtgagctgctccgaaaccgctgtatacaacgagaacggactagacatcgcggcgctgcgggcgcacgtcgtgcagggcgggctgctcaaggactttgcgggcgggacgggtgtgcctaacgatgacaactttttggaccttccagcggatgtgctcatcccttgcgctgtggacggaaccatccacaaagacaacgtggcgcgctgcctgcattttaaggctgtcgtggaggcggccaactcggccctgactcccgacgccgatgcggtcctacgcgaacacggcattccggtgctgcctgacatctacgccaacggcggcgcggtgatcgtgtcgttctttgagtgggtgcaaaacaaccagaacctgcagtgggaggaggatgaggtgaagcgggagctggacaggtacctgaccgacgcgtacaacgctttgctacgggagcaggagcagtacggcacctctctgtcgttgcgtacggcagggtacctcgtagcgctgaagcggttgcagcaggcggagcttgtgcggggtcactcctga

SEQ ID NO: 97 - DNA, 2485 bp, Physcomitrella patens
agcgtcgtcgacttgcaattgtgtgcgagtgtgtgagtgagtgtgtgttctacgtggtgctggaatccgttgtttccccgctgtcttcactctgattgtgtcgccaccttttgtttttttatatgtattattcccccgccctcgccctcgccctcgcccgcgccctttccgtatcttgttgctgttgttgttgtcgttgttgttgttgtggttcttgtgactcccaagtcccatgcaattgcaagcgagcgtaggaccaggagtagtagcagtagttgtagcacattgagatcagcagcaggcagctagcccctgcttcaccactttaccatgtccctcttgtcacgctcacgctcctcttccctgcctgctgcttgctccttgcctgcttcctctatttatcctccatctgcatccagcttttctcccatcgcttcagccatcgtctcttttccttgtgccggcaactcccaggctctgctctcctcgatttcgtcctagtgtgccgtgtagcttgccaataattttgttgaggaacattctaaaattcactactacgatcatgacaatggcaattcgcttgataaaaggagcctcctccacgcggggaccgtttgcgctcttatgcgcagctgccggtgctcgcatccgctactcgactgccgccgcggtgtcttctaccaccacgacggttacttctactaccacgacacctgctggacatggcgccattgcgcatggcgatccatcatttttggagtctgtggacatttattttgacaaagctgctgcaattgcctccaccaccccagacattcttgcccagataaaggcttgcaacaatattctgaaagtacaatttcccttgaagtgcgcaaatggcactgtggagctcattgagggttatcgcgcacaacattcacaccaccgtcttcctgtgaaaggaggaatccgtatggccccaaacgttgatgccgatgaaaccatggcactagcagctcttatgacattcaaatgtgccgttgttgatgtgccctttggaggtgcaaaaggtggtattaaaatcgacccaacgaaatattctatgaacgagaaggaagctataataaggcggtacaccagcgagcttgtgaggaagaacttcattggaccttccatcgatgtaccagctcctgactatgggactggtccccaagaaatggcatggattaaagatacttttgagcacctgcagccgaatgatattaatggttcagcttgtgtaactggaaaacctttggaggagggaggtattgatggaaggacagaggcaacgggactaggagttttcttctgtttgcgggagtttctcaatgatgagaccctggttgctaggttgggcatgacgaaaggcattaaggggaagacgttcatcgtacagggtttcgggaatgtaggtcgtcacacagtcgattacatacatggtgctggaggaaaaatcattgccattgctgaggcggatggaggcttggtggacgagtcgggggatggcttggatattcctgccgtgaaggcctatcataaaaagaagggaacaatcacgggatttcccggcgctaagacgatgaaatttgccccaagcattttagaacttccttgtgacgtgctgatacctgctgccctagaatcacagattcactctggaaatgcaggaaacattaaggctaaaattgtggcggaggctgcaaatggcccagttactcctttggcagagacgatattggaagacaacgatgtggtcatcttacctgatttattgctaaatgctggaggtgtgacagtctcatacttcgagtggttgaaaaacttaaaccacattcacttcggacgcatgagtaaacgcatggaagagagagggaaaagagtactcattgatgctctggagaatgagttcggaaacggccataggttctctgacacagttcgaagccaagtcgttaaggggaatacggaagttgattttgtctggtctggcctggaggaaaccatgttgtcgagctgggaatgtgtgaaaaaaatagctgaagaaaggaagtgtaattttcgcacagctgcatacttgattgctattgagagaattgcgacctgctaccgggtgagcggtattttcccttgaagttggaggtgtgccacagaatccaggccttgaagcaacatggtctagaagcaagggcttgtgcttcccatgtcaacgaagtccttcaaaatagatttggcctgatcaatcatcctagagagttttgctagtacattctttcatttatttttaccagtattctgccaaatgccaggatatctgtgctaaagtcaactcttgtctgctggttccagtagtcagtactaggtgcagttgcatcactaagagtgcgcacacacagcttctgtaaacacacagattctaaattacaacgttttgtaaagaccaacatttgtctctttgtttact

SEQ ID NO: 98 - DNA, 1752 bp, Selaginella moellendorffii
atgtattggggtggccaaaatgatagcgacgagcacactccctccaatgggccccagtcaacgccggccagactagacttgaccagaaaagtcttgacttcgactggcgtcacgccgcccgggggattcgaacccccgaccacaagggaaagagagcaatgtgttgcgcccgggcgggcattgcctgggcaagcgtcgggattccacagctcactcgcggattgcgtgatggaaatgttgctccggcgcagttcaattctttctaagagatgcattcctgctgtcttggctctaccccggaatctatcctctcttgtcactggtgatgcggcgttcttggaggctgtggatatttactacgataaagctgcggcactagcgtctccaactccagatatattggctcagataaagggatgtaacaatatcttaaaggtccaatttcctctcaagtgttccgatggaacagtggagcttatcgaggcttatagagctcaacattctcaccatcgaatgccagtcaagggtggcatacgaatggctccaaatgttgatgccgaagaaacaatggcgttggctgcgttgatgactttcaagtgcgctctcgtggacatcccatttggaggggcgaaaggaggaatcaaaataggtgggaatgatccttatcctgcgaagtattccaccggggaaaaggaagcgatcataaggcgatacaccagtgagcttgtaaagaagaacttcattggtcctgcgattgacgttcctgcccctgattatggaacaggatcccaagaaatggcctggatcaaggacacttacgagcatctccagtcaactgacataaatggaacagcttgcgtaactggaaagccacttgaagagggaggtattcatgggaggcaagaagctacaggcttaggagtgtttttctgtttgagagagtttttagatgacgagggtctgatatccaagctgcaaatgaaacctggtattgaagggaaaactatcatcgtgcaaggctttggaaacgtcggccaacacaccattgattgcattgaagatgctggcggaagaatcatagccatcgcagagaaggatggtggggttgttgatgagacaggaaagggcttgaacatcaaagaggtcaaggattactttaagcggaagggaacaataacaggatttcccaagggttccactgttgaagactcttcaaaaatattagagctgccgtgtgatgttttgattccagctgcgttggagtcacaaatacattctggcaacgcctcttttatacaggcccgcattatagcagaggctgctaatggcccggtaactcctgctgccgaagcgatcctagagaaaagaggagttgttattttaccagatttgcttctgaatgcgggtggagtgactgtgtcatattttgaatggctaaagaatttgaatcacattcactttgggcgcatgagtcgtagaatggaagagcgtggaaaacgggtttttcttgaggctctcgaactggagtttggaaatggaaacagattatctgacgagcttcgtcgcgaacttgttaaaggaaatacagaggtggatttcgtgtggtccggacttgaagagaccatgctggttgcatgggacaaagttaaggcggtcgctgctaaaaagggctgcaactttcgcacagcagcatatttgatagctattgagaggatagcgacatgctacaaagtcagtgggatatttccctga

SEQ ID NO: 99 - DNA, 1190 bp, Brassica napus
gctgccaacaaagagattgaaatccttttttcgcatcatctcatcttcacaaagaaaccaaatttccatctccacaaaggattgaccttgatctcaagctctctgttttttttttccttctcgtatctgtttcctgtactaatcttgactttgtgatttaggtgaagtgcaggatccccaagggcgatgaactcttgttgcctacgtcgggtttacggttcaacccgacaatgctcgtggacccatgaaaggaggaattagatatcaccccgaggttgatctcgatgaagtcaatgcactagtttagctcatgaattggaagatggatgtagctgacattccatacggcggaacatccgaacatggtgtcgtctatgccactgaagctcttcttgctgaatacggaaaatcgattaaggggttgacatttgttgttcaaggttttgggaatgttggaacatgggcagtcaagctgatccatgagaaaggtgggaaagtggttgcagtaagcgacatcacaggtgctgtcagaaaccctgaaggtctagacatcgacgctcttctgagtcacaaagaagcaactggaagtctagttgatttcagtggtggagacgctatggactcaaatgaactgcttatccatgagtgtgatgttctcattccttgtgctcttggtggtgtcttgaacaaggaaaatgctggagatgtgaaggcaaagttcataatagaggctgcaaaccatccaactgatccagatgctgatgagattctgtcgaagaaaggagtgattatacttccagatatatacgcaaacgcaggaggagtgacggtgagttactttgagtgggtgcagaacattcaagggttcatgtgggaagaggagaaagtgaacctggagttgcagaagtacatgactcgtgcctttcacaacatcaagtcaatgtgccatactcattcctgtaacctccgtatgggagctttcactcttggagttaaccgtgttgctagagccacccagttgcgtggttgggaagcttgattctattgaattttcccaaatatactctgttttcccctgtttttttttttgcttcattgtttgctgataatttatgttccgaaatggaaaagaaaacaaatgaattgaataactaaaaaataaataaatttttgttactgaaaaaaaaaaa

SEQ ID NO: 100 - protein, 411 aa, Arabidopsis thaliana
MNALAATNRNFRHASRILGLDSKIERSLMIPFREIKVECTIPKDDGTLVSYIGFRVQHDNARGPMKGGIRYHPEVDPDEVNALAQLMTWKTAVADIPYGGAKGGIGCSPRDLSLSELERLTRVFTQKIHDLIGIHTDVPAPDMGTNAQTMAWILDEYSKFHGHSPAVVTGKPIDLGGSLGREAATGRGVVFATEALLAEYGKSIQGLTFVIQGFGNVGTWAAKLIHEKGGKVVAVSDITGAIRNPEGIDINALIKHKDATGSLNDFNGGDAMNSDELLIHECDVLIPCALGGVLNKENAGDVKAKFIVEAANHPTDPDADEILSKKGVIILPDIYANAGGVTVSYFEWVQNIQGFMWEEEKVNLELQKYMTRAFHNIKTMCHTHSCNLRMGAFTLGVNRVARATQLRGWEA

SEQ ID NO: 101 - protein, 411 aa, Brassica napus
MNALAATNRNFRHASRILGLDSKIEKSLMIPFREIKVECTIPKDDGTLVSYVGFRVQHDNARGPMKGGIRYHPEVDPDEVNALAQLMTWKTAVADIPYGGAKGGIGCNPRDLSLSELERLTHVFTQKIHDLIGIHTDVPAPDMGTNAQTMAWILDEYSKFHGHSPAVVTGKPIDLGGSLGREAATGRGVVYATEALLAEYGKSIKGLTFVVQGFGNVGTWAAKLIHEKGGKVVAVSDITGAVRNPEGLDIDALLSHKEATGSLVDFSGGDAMDSNELLIHECDVLIPCALGGVLNKENAGDVKAKFIIEAANHPTDPDADEILSKKGVIILPDIYANAGGVTVSYFEWVQNIQGFMWEEEKVNLELQKYMTRAFHNIKSMCHTHSCNLRMGAFTLGVNRVARATQLRGWEA

SEQ ID NO: 102 - protein, 411 aa, Centaurea solstitialis
MNALAATNRNFRNAARLLGLDSRLERSLLIPFREIKVECTIPRDDGTLTSYVGFRVQHDNSRGPMKGGIRYHPEVDPDEVNALAQLMTWKTAVANIPYGGAKGGIGCTPKDLTLSELERLTRVFTQKIHDVIGIRTDIPAPDMGTNAQTMAWILDEYSKFHGYSPAIVTGKPIDLGGSLGREAATGRGVVFATEALLAEHGKSIKDMTFAIQGFGNVGSWAARLIHEKGGKIVAVSDVTGAVKNPNGIDILALLKHKETTRSLSEFNGGDSMNADELLVHECDVLIPCALGGVLNRENAGDVKAKFIVEAANHPTDPEADEILTKKGVTILPDIYANAGGVTVSYFEWVQNTQGFMWDEEKVNSELKKYMTRAFHDIKGMCQTHECNLRMGAFTLGVDRVARCTILRGWEA

SEQ ID NO: 103 - protein, 411 aa, Gossypium hirsutum
MNALAATNRNFRLASRLLGLDSKLEKSLLIPFREIKVECTIPKDDGTLATYVGFRIQHDNARGPMKGGIKYHPEDEPDEVNALAQLMTWKTAVAAIPYGGAKGGIGCNPTDLSKSELERLTRVFTQKIHDLIGIHTDVPAPDMGTNAQTMAWILDEYSKFHGHSPAVVTGKPIDLGGSLGREAATGRGVVYATEALLAEYEKSIKGMTFVIQGFGNVGSWASRLIHEKGGKVIAVSDITGALKNPNGIDIPELLKHKEATGSLKSFNGGDSMDPNELLVHECDVLIPCALGGVLNRENAADVKAKFIIEAANHPTDPEADEILSKKGVIILPDIYANAGGVTVSYFEWVQNIQGFMWDEEKVNQELKKYMTKAFHNIKNMCQSHDCNLRMGAFTLGVNRVARATILRGWEA

SEQ ID NO: 104 - protein, 412 aa, Glycine max
MNALAATNRNFQRAARILGLDSKLEKSLLIPFREVKVECTIPKDDGTLVSYVGFRIQHDNARGPMKGGIRYHPEVDPDEVNALAQLMTWKTAVADIPYGGAKGGIGCNPRDLSISELERLTRVFTQKIHDLIGIQKDVPAPDMGTNAQTMAWILDEYSKFHGHSPAVVTGKPIDLGGSLGREAATGLGVVFATEALFAEYGKSISDHTFVIQGFGNVGTWAAKSIFERGGKVIAVSDISGAIKNLNGIDILALLKHKDGNGGVLKDFPGAEAMDPDELLVHECDVLVPCALGGVLNKENAADVKAKFIIEAANHPTDPDADGILSKKGVIILPDIYANAGGVTVSYFEWVQNIQGFMWDEEKVNRELKKYMTKAVQDIKAMCKIHNCDLRMGAFTLGVNRVARATLLRGWEA

SEQ ID NO: 105 - protein, 411 aa, Gossypium raimondii
MNALAGTSRNFRLASRLLGLDSKLEKSLLIPFREIKVECTIPKDDGTLVSYVGFRIQHDNARGPMKGGIRYHPEVDPDEVNALAQLMTWKTAVADIPYGGAKGGIGCSPRDLSKSELERLTRVFTQKIHDLIGIHTDVPAPDMGTNAQTMAWILDEYSKFHGHSPAVVTGKPIDLGGSLGREAATGRGVVYATEALLAEYWKAVKGLTFIIQGFGNVGSWVARLIHERGGKVIAVSDVTGAVKNQNGIDIPQLLKHKETTGSLTGFSGGDSLDPSELLVHECDVLVPCALGGVLNRENAAHVKAKFIIEAANHPTDPEADEILSKKGVIILPDIYANAGGVTVSYFEWVQNIQGFMWDEDKVNKELKRYMTQAFHNIKTMCQTHHCNLRMGAFTLGVNRVARATLLRGWEA

SEQ ID NO: 106 - protein, 411 aa, Gossypium raimondii
MNALAATNRNFRLASRLLGLDSKLEKSLLIPFREIKVECTIPKDDGTLATYVGFRIQHDNARGPMKGGIRYHPEVEPDEVNALAQLMTWKTAVADIPYGGAKGGIGCNPRDLSKSELERLTRVFTQKIHDLIGIHTDVPAPDMGTNAQTMAWILDEYSKFHGHSPAVVTGKPIDLGGSLGREAATGRGVVYATEALLAEYGKSIKGMTFGIQGFGNVGSWASRLIHEKGGKVIAVSDITGALKNPNGIDIPELLKHKEATGSLKSFNGGDSMDPNELLVHECDVLIPCALGGVLNRENAADVKAKFIIEAANHPTDPEADEILSKKGVIILPDIYANAGGVTVSYFEWVQNIQGFMWDEEKVNQELKKYMTKAFHNIKNMCQSHDCNLRMGAFTLGVNRVARATILRGWEA

SEQ ID NO: 107 - protein, 411 aa, Hordeum vulgare
MNALAATSRNFRQAARLLGLDSKLEKSLLIPFREIKVECTIPKDDGTLASFVGFRVQHDNARGPMKGGIRYHPEVDPDEVNALAQLMTWKTAVAAVPYGGAKGGIGCSPGDLSRSELERLTRVFTQKIHDLIGTHTDIPAPDMGTNSQTMAWIFDEYSKFHGHSPAVVTGKPIDLGGSLGRDAATGRGVMYATEALLAEYGKSISGSTFVIQGFGNVGSWAAQLIHEKGGKVIALGDVSGTIRNKAGIDVPALMKHRNEGGQLKDFHGAEVMDSSELLVHECDVLLPCALGGVLNKDNAPDVKAKFIIEAANHPTDPEADEILTKKGVVVLPDIYANAGGVIVSYFEWVQNIQGFMWEEEKVNMELHKYMNSAFQHIKAMCKSQDCSLRMGAFTLGVNRVARATILRGWEA

SEQ ID NO: 108 - protein, 411 aa, Medicago truncatula
MNALVATNRNFQRASRILGLDSKLEKSLLIPYREIKVECTIPKDDGSLVSYVGFRIQHDNARGPMKGGIRYHPEVDPDEVNALAQLMTWKTAVVDIPYGGAKGGIGCNPKDLSISELERLTRVFTQKIHDLIGIHRDVPAPDMGTNSQTMAWILDEYSKFHGHSPAVVTGKPIDLGGSLGREAATGLGVVFATEALFAEYGKSISDMTFAIQGFGNVGTWAAKAIFERGGKVVAVSDINGAISNPNGIDIAALLKHKAGNGSLKDFSGGDAMNPNDLLVHDCDVLIPCALGGVLNKENANDVKAKFIIEAANHPTDPDADEILSKKGVIILPDVYANAGGVTVSYFEWVQNIQGFMWDEEKVNQELKRYMTKAFNDIKANCKTHNCDLRMGAFTLGLNRVARATLLRGWEA

SEQ ID NO: 109 - protein, 412 aa, Oryza sativa
MNALAATSRNFRQAARLLGLDSKLEKSLLIPFREIKVECTIPKDDGTLASFIGFRVQHDNARGPMKGGIRYHPEVDPDEVNALAQLMTWKTAVAAIPYGGAKGGIGCAPGELSTSELERLTRVFTQKIHDLIGAHTDVPAPDMGTNSQTMAWILDEYSKFHGHSPAVVTGKPIVSLGGSLGRDAATGRGVMYATEALLAEHGKSISGSTFVIQGFGNVGSWAARIIHEKGGKVIALGDVTGSIRNKNGLDIPALMKHRNEGGALKDFHDAEVMDSSELLVHECDVLIPCALGGVLNRENAPDVKAKFIIEAANHPTDPEADEILAKKGVTILPDIYANSGGVIVSYFEWVQNIQGFMWDEEKVNMELHKYMNNSFQHIKAMCKSHDCNLRMGAFTLGVNRVARATLLRGWEA

SEQ ID NO: 110 - protein, 411 aa, Oryza sativa
MNALAATSRNFRQAARLLGLDSKLQKSLLIPLREIKVECTIPKDDGTLATFVGFRVQHDNSRGPMKGGIRYHPEVDPDEVNALAQLMTWKTAVAAVPYGGAKGGIGCTPGELSRSELERLTRVFTQKIHDLIGINTDVPAPDMGTNAQTMAWILDEYSKFHGHSPAVVTGKPIDLGGSLGRDAATGRGVMYATEALLTEYSESISGSTFVIQGLGNVGSWAAKLIHQKGGKIVAVGDVTGAIRNKSGIDIPALLKHRSEGGSLEDFYGAEVMDAAELLVHECDVLVPCALGGVLNRENAAEVKARFIIEGANHPTDTEADEVSSKKGVIVLPDIYANSGGVVVSYFEWVQNIQGFMWDEEKVNRELQKYMKNAFQNIKDMCKSQNCNLRMGAFTLGVNRVAKATLLRGWEA

SEQ ID NO: 111 - protein, 411 aa, Populus x canadensis
MNALAATNRNFRHAARILGLDSKVEKSLLIPFREIKVECTIPKDDGTLASYIGFRVQHDNARGPMKGGIRYHPEVDPDEVNALAQLMTWKSAVADIPYGGAKGGIGCNPGDLSKSELERLTRVFTQKIHDLIGVHTDVPAPDMGTNAQTMAWILDEYSKFHGHSPAVVTGKPINLGGSLGREAATGRGVVFATEALLAEHGKSIKGLTFAVQGFGNVGSWAAKIIHERGGKVIAVSDISGAVKNPNGLDIPELIRHKESTGSLKNFQGGDSMDANELLVHECDVLIPCALGGVLNRENAADVKAKFIIEAANHPTDPEADEILAKKGVVVLPDIYANSGGVTVSYFEWVQNIQGFMWDEEQVNKTLQNYMTRAFHNIKVMCQTHDCNLRMGAFTLGVNRVARATLLRGWEA

SEQ ID NO: 112 - protein, 411 aa, Pinus taeda
MNALAATSRNFRQAARLLGLDSRLEKSLLIPFREVKVECTIPKDDGTIASYVGYRVQHDNARGPMKGGIRYHPEVDPDEVNALAQLMTWKTAVANIPYGGAKGGIGCSPSSLSKTELERLTRVFTQKIHHLIGINMDIPAPDMGTNSQTMAWILDEYSKFHGHSPAVVTGKPLDLGGSLGRDAATGRGVVIATEALLAEHGIPIRDQRFVIQGFGNVGSWAAKLIHEKGGKVVAISDITGALKNTSGLDIPSIIRYSKENGNIKDFTEAEAIDPECLLHEECDVLIPAALGGVLSRENASELRAQFIVEAANHPTDPEADEILSKKGVVILPDIYANAGGVIVSYFEWVQNIQGFRWDEPQVNNELQTYMMSAFTDIKDMCKKLDCDLRMGAFSLGLERVARATNLRGWEV

SEQ ID NO: 113 - protein, 411 aa, Populus tremula
MNALAATNRNFRHAARILGLDSKVEKSLLIPFREIKVECTIPKDDGTLASYIGFRVQHDNARGPMKGGIRYHPEVDPDEVNALAQLMTWKSAVADIPYGGARGGIGCNPGDLSKSELERLTRVFTQKVHDLIGVHTDVPAPDMGTNAQTMAWILDEYSKFHGHSPAVVTGKPIDLGGSLGREAATGRGVVFATEALLAEHGKSIKGLTFAVQGFGNVGSWAAKIIQERGGKVIAVSDISGAVKNPNGIDIPELIRHKESTGSLKNFQGGDSMDANELLVHECDVLIPCALGGVLNRENAADVKAKFIIEAANHPTDPEADEILAKKGVVVLPDIYANSGGVTVSYFEWVQNIQGFMWDEEQVNKTLQNYMTRAFHNIKVMCQTHDCNLRMGAFTLGVNRVARATLLRGWEA

SEQ ID NO: 114 - protein, 411 aa, Populus trichocarpa
MNALAATNRNFRHAARILGLDSKVEKSLLIPFREIKVECTIPKDDGTLASYIGFRVQHDNARGPMKGGIRYHPEVDPDEVNALAQLMTWKSAVADIPYGGAKGGIGCNPGDLSKSELERLTRVFTQKIHDLIGVHTDVPAPDMGTNAQTMAWILDEYSKFHGHSPAVVTGKPIDLGGSLGREAATGRGVVFATEALLAEHGKSIKGLTFAVQGFGNVGSWAAKIIHERGGKVIAVSDISGAVKNPNGIDIPELIRHKESTGSLKNFQGGDSMDANELLVHECDVLIPCALGGVLNRENAADVKAKFIIEAANHPTDPEADEILAKKGVVVLPDIYANSGGVTVSYFEWVQNIQGFMWDEEQVNKTLQNYMTRAFHNIKVMCQTHDCNLRMGAFTLGVNRVARATLLRGWEA

SEQ ID NO: 115 - protein, 411 aa, Populus trichocarpa
MNALAATSRNFRHASRLLGLDSKVEKSLLIPFREIKVECTIPKDDGTLVSYVGFRVQHDNARGPMKGGIRYHPEVDPDEVNALAQLMTWKSAVADIPYGGAKGGIGCNPGDLSKSELERLTRVFTQKIHDLIGVHTDVPAPDMGTNAQTMAWILDEYSKFHGHSPAVVTGKPIDLGGSLGREAATGRGVVFATEALLAEHGKSIKDLTFAIQGFGNVGSWAAKLIHERGGKVIAVSDITGAVKNPNGIDIPELLRHKETTGSLKDFQGAESMDANELLIHKCDVLIPCALGGVLNRENAADVKAKFIIEAANHPTDPEADEILAKKGVVVLPDIYANSGGVTVSYFEWVQNIQGFMWDEQQVNNTLQNYMTRAFHNIKSMCQTHDCNLRMGAFTLGVSRVARATLLRGWEA

SEQ ID NO: 116 - protein, 411 aa, Sorghum bicolor
MNALAATSRNFRRASKLLGLDSKLEQSLLIPFREIKVECTIPKDDGTLASFVGFRVQHDNARGPMKGGIRYHPEVDPDEVNALAQLMTWKTAVAAVPYGGAKGGIGCSPGELSRSELERLTRVFTQKIHDLIGTHTDVPAPDMGTNAQTMAWMLDEYSKFHGHSPAVVTGKPIDLGGSLGRDAATGRGVMYATEALLAEYGKCISGSTFVIQGFGNVGSWAARLIHEKGGKIIAIGDVTGSIKNMSGIDIPALMKHKNEGHAMKDFHGAEVMDSTELLVHECDVLVPCALGGVLNKDNAPSVKAKFIVEAANHPTDPEADEILAKKGVVVLPDIYANSGGVIVSYFEWVQNIQGFMWDEEKVNNELEKYMSSAFQHIKAMCKSLDCNLRMGAFTLGVNRVARATLLRGWEA

SEQ ID NO: 117 - protein, 411 aa, Solanum lycopersicum
MNALAATNRNFRQAARILGLDSKIEKSLLIPFREIKVECTIPKDDGTLVSYVGFRVQHDNARGPMKGGIRYHPEVDPDEVNALAQLMTWKTAVADIPYGGAKGGIGCNPKDLSVSELERLTRVFTQKIHDLIGVNTDVPAPDMGTNAQTMAWILDEYSKFHGHSPAIVTGKPIDLGGSLGREAATGRGVVYATEALLAEYGKHVKDLTFAIQGFGNVGAWAGKLIHERGGKVVAVSDITGAIKNSNGIDIPALLSHKEKTGKLIDFAGADVMNSDELLTHECDVLIPCALGGVLNRENADNVKAKFIIEAANHPTDPDADEILSKKGVVILPDIYANAGGVTVSYFEWVQNIQGFMWDEENVNRELKKYMTRAFHNLKGMCHSHNCNLRMGAFTLGVNRVARATQLRGWEA

SEQ ID NO: 118 - protein, 411 aa, Triticum aestivum
MNALAATSRNFRQAARLLGLDSKLEKSLLIPFREIKVECTIPKDDGTLASFVGFRVQHDNARGPMKGGIRYHPEVDPDEVNALAQLMTWKTAVAAVPYGGAKGGIGCSPGDLSRSELERLTRVFTQKIHDLIGTHTDIPAPDMGTNSQTMAWIFDEYSKFHGHSPAVVTGKPIDLGGSLGRDAATGRGVMYATEALLAEYGKSISGSTFVIQGFGNVGSWAAQLIHEKGGKVIALGDVSGTIRNKAGIDVPALMKHRNEGGQLKDFHGAEVMDASELLVHECDVLLPCALGGVLNRENAPEIKAKFIIEAANHPTDPEADEILTKKGVVVLPDIYANAGGVIVSYFEWVQNIQGFMWEEEKVNMELHKYMNSAFQNIKAMCKSQDCNLRMGAFTLGVNRVARATILRGWEA

SEQ ID NO: 119 - protein, 411 aa, Vitis vinifera
MNALAATNRNFRHASRILGLDSKLEKSLLIPFREIKVECTIPKDDGSLATYVGFRVQHDNARGPMKGGIRYHPEVDPDEVNALAQLMTWKTAVIDIPYGGAKGGIGCTPKDLSMSELERLTRVFTQKIHDLIGTHTDVPAPDMGTNAQTMAWILDEYSKFHGHSPAVVTGKPIALGGSLGREAATGRGVVFATEALLAQHGKSIKGLTFVIQGFGNVGSWVARLIGERGGKIIAVSDVTGAVKNQNGLDIVDLLRHKEETGCLTNFSGGDHMDPNELLTHECDVLIPCALGGVLNKENAADVKAKFIIEAANHPTDPEADEILSKKGVVILPDIYANAGGVTVSYFEWVQNIQGFMWEEEKVNNELQKYMTKAFHNIKAMCQSHNCSLRMGAFTLAVNRVACATTLRGWEA

SEQ ID NO: 120 - protein, 411 aa, Zea mays
MNALAATTRNFRRASKLLGLDSKLEQSLLIPFREIKVECTIPKDDGSLATFVGFRVQHDNARGPMKGGIRYHNEVDPDEVNALAQLMTWKTAVAAVPYGGAKGGIGCSPGELSRSELERLTRVFTQKIHDLIGTHTDVPAPDMGTNAQTMAWMLDEYSKFHGHSPAVVTGKPIDLGGSLGRDAATGRGVMYATEALLAEYGKCISGSTFVIQGFGNVGSWAARLIHEKGGKIIAIGDVTGSIRNTAGIDIPALVKHRNEGHAMKDFDGAEVLDSTELLVHDCDVLVPCALGGVLNKDNAPDVKAKFVIEAANHPTDPEADEILAKKGVVVLPDIYANSGGVVVSYFEWVQNIQGFMWDEEKVNDELEKYMSSAFQHMKAMCKSLDCDLRMGAFTLGVNRVARATLLRGWEA

SEQ ID NO: 121 - protein, 411 aa, Aquilegia formosa x pubescens
MNALVATSRNFKRAARLLSLDSKLEKSLLIPFREIKVECTIPKDDGTLASFVGFRIQHDNARGPMKGGIRYHPEVDPDEVNALAQLMTWKTAVANVPYGGAKGGIGCDPGELSISELERLTRVFTQKIHDLIGVHTDVPAPDMGTNPQTMAWILDEYSKFHGYSPAVVTGKPIDLGGSLGRDAATGRGVLFATEALLKEYGKSITGQRFVIQGFGNVGSWAAQLISESGGKIVAISDVTGAIKNSNGIDIPSLLKHTQENRGVKGFNGGDSIDPASILVEDCDVLIPAALGGVINKDNANEIRAKFIIEAANHPTDPEADEILSKKGVVILPDILANSGGVTVSYFEWVQNIQGFMWDEEKVNTELKNYMTNGFKDVKDMCQTHHCDLRMGAFTLGVNRVARATVLRGWEA

SEQ ID NO: 122 - protein, 411 aa, Asparagus officinalis
MNALAATSRNFKQAAKLLGLDPKLEKSLLIPFREIKVECTIPKDDGTLASFVGFRVQHDNARGPMKGGIRYHSEVDPDEVNALAQLMTWKTAVANIPYGGAKGGIGCSPGDLSLSELERLTRVFTQKIHDLIGVHTDVPAPDMGTNAQTMAWILDEYSKFHGYSPAIVTGKPVDLGGSLGRDAATGRGVLFATEALLAEYGKGISGQRFVIQGFGNVGSWAAQLITKAGGKVVAVSDVTGAIKHSNGLDIENLLKYSVKNRGIKGFSGGDAIDSNSLLTEDCDVLIPAALGGVINRENANDVRAKFIIEAANHPTDPEADEILSKKGVCILPDILANSGGVTVSYFEWVQNIQGFMWDEEKGNSELKTYMTKGFKHVKEMCKTHNCDLRMGAFTLGVNRVARATLLRGWEA

SEQ ID NO: 123 - protein, 411 aa, Arabidopsis thaliana
MNALAATNRNFKLASRLLGLDSKLEKSLLIPFREIKVECTIPKDDGTLASFVGFRVQHDNARGPMKGGIRYHPEVEPDEVNALAQLMTWKTAVAKIPYGGAKGGIGCDPSELSLSELERLTRVFTQKIHDLIGIHTDVPAPDMGTGPQTMAWILDEYSKFHGHSPAVVTGKPIDLGGSLGRDAATGRGVLFATEALLNEHGKTISGQRFAIQGFGNVGSWAAKLISDKGGKIVAVSDVTGAIKNNNGIDILSLLEHAEENRGIKGFDGADSIDPDSILVEDCDILVPAALGGVINRENANEIKAKFIIEGANHPTDPEADEILKKKGVMILPDIYANSGGVTVSYFEWVQNIQGFMWDEEKVNRELKTYMTRGFKDLKEMCQTHSCDLRMGAFTLGINRVAQATTIRGWGS

SEQ ID NO: 124 - protein, 411 aa, Arabidopsis thaliana
MNALAATNRNFKLAARLLGLDSKLEKSLLIPFREIKVECTIPKDDGTLASFVGFRVQHDNARGPMKGGIRYHPEVDPDEVNALAQLMTWKTAVAKIPYGGAKGGIGCDPSKLSISELERLTRVFTQKIHDLIGIHTDVPAPDMGTGPQTMAWILDEYSKFHGYSPAVVTGKPIDLGGSLGRDAATGRGVMFGTEALLNEHGKTISGQRFVIQGFGNVGSWAAKLISEKGGKIVAVSDITGAIKNKDGIDIPALLKHTKEHRGVKGFDGADPIDPNSILVEDCDILVPAALGGVINRENANEIKAKFIIEAANHPTDPDADEILSKKGVVILPDIYANSGGVTVSYFEWVQNIQGFMWEEEKVNDELKTYMTRSFKDLKEMCKTHSCDLRMGAFTLGVNRVAQATILRGWGA

SEQ ID NO: 125 - protein, 411 aa, Centaurea solstitialis
MNALAATNRNFKLAARLLGLDSKLERSLLIPFREIKVECTIPKDDGTLVSYVGFRIQHDNARGPMKGGIRYHPEVDPDEVNALAQLMTWKTAVANIPYGGAKGGIGCNPGELSISELERLTRVFTQKIHDLIGIHTDVPAPDMGTNPQTMAWILDEYSKFHGYSPAVVTGKPIDLGGSLGRDAATGRGVLFATEALLNDYGKTVAGQRFVIQGFGNVGSWAAQLIHEAGGIVVAVSDISGAIKDNNGLDIPNLLKHVKEHRGVKGFGGANSIDANSILVEDCDILIPAALGGVINRENANEIKAKFIIEAANHPTDPEADEILSKKGVVILPDIFANSGGVTVSYFEWVQNIQGFMWDEAKVNKELKKYIGQGFKDVKEMCSTHNCDLRMGAFTLGVNRVARATVLRGWEA

SEQ ID NO: 126 - protein, 411 aa, Glycine max
MNALAATNRNFKLASRLLGLDSKLEKSLLIPFREIKVECTIPKDDGTLQSYVGFRVQHDNARGPMKGGIRYHPEVDPDEVNALAQLMTWKTAVANIPYGGAKGGIGCDPAELSISELERLTRVFTQKIHDLIGTHTDVPAPDMGTGPQTMAWILDEYSKFHGYSPAVVTGKPIDLGGSLGRDAATGRGVLFATEALLNEYGKSVSGQRFVIQGFGNVGSWAAQLISNKGGKVVAVSDITGAIKNSNGLDIPSLLEHSKVHRGVKGFNGSDPIDPNSILVEDCDVLVPAALGGVINRENANEIKAKFIVEAANHPTDPEADEILKKKGVVILPDIFANSGGVTVSYFEWVQNIQGFMWDEEKVNNELKTYMTKGFKDVKEMCKTHECDLRMGAFTLAVNRVARATVLRGWEA

SEQ ID NO: 127 - protein, 411 aa, Gossypium raimondii
MNALVATNRNFKLAARLLGLDSKLEKSLLIPFREIKVECTIPKDDGTLATFVGFRIQHDNARGPMKGGIRYHPEVDPDEVNALAQLMTWKTAVANIPYGGAKGGIGCNPGELSKSELERLTRVFTQKIHDLIGIHTDVPAPDMGTGPQTMAWILDEYSKFHGHSPAVVTGKPIDLGGSLGRDAATGRGVLFATEALLNEHGKSISGQKFVIQGFGNVGSWAAQLIHEKGGKVVALSDITGAIKNSNGIDIPSLLKHVKENKGIKGFHGGDSIDPKSVLVEDCDILIPAALGGVINRENANEIKAKFIIEAANHPTDPEADEILSKKGVIILPDIYANSGGVTVSYFEWVQNIQGFMWDEEKVNSELKTYMTKGFKDVKEMCQTHNCDLRMGAFTLGVNRVARATVLRGWEA

SEQ ID NO: 128 - protein, 411 aa, Helianthus annuus
MNALAATNRNFKLASRLLGLDSKLEKSLLIPFREIKVECTLPKDDGTLVSYVGFRIQHDNARGPMKGGIRYHPEVDPDEVNALAQLMTWKTAVANIPYGGAKGGIGCNPGELSISELERLTRVFTQKIHDLIGIHTDVPAPDMGTNPQTMAWILDEYSKFHGYSPAVVTGKPIDLGGSLGRDAATGRGVLFATEALLNDQGKSIAGQRFVIQGFGNVGSWAAQLIHEAGGKVVAVSDVSGAIKDKNGIDIPSLIKHVKEHKGVKGFSGANAIEGSSILVEDCDILIPAALGGVINRENAKDIKAKYIIEAANHPTDPEADEILSKKGVIILPDIFANSGGVTVSYFEWVQNIQGFMWDEEKVNAELKKYIQQGFKDVKEMCKTHNCDLRMGAFTLGLNRVARATVLRGWEA

SEQ ID NO: 129 - protein, 411 aa, Helianthus argophyllus; identical to SEQ ID NO: 128

SEQ ID NO: 130 - protein, 411 aa, Hordeum vulgare
MNALAATSRNFKQAAKLLGLDSKLEKSLLIPFREIKVECTIPKDDGTLASYVGFRVQHDNARGPMKGGIRYHHEVDPDEVNALAQLMTWKTAVANIPYGGAKGGIGCSPGDLSISELERLTRVFTQKIHDLIGIHTDVPAPDMGTNAQTMAWILDEYSKFHGYSPAVVTGKPVDLGGSLGRDAATGRGVLFATEALLAEHGKGIAGQRFVIQGFGNVGSWAAQLITEAGGKVIAISDVTGAVKNTNGIDIAKLMKHSAENRGIKGFDGGDAVDPTSLLTEECDVLIPAALGGVINKDNADAIKAKYIIEAANHPTDPEADEILAKKGVLILPDILANSGGVTVSYFEWVQNIQGFMWDEEKVNRELKTYMTRAFRDTKEMCRSHHCDLRMGAFTLGVNRVARATVLRGWEA

SEQ ID NO: 131 - protein, 411 aa, Ipomoea nil
MNALAATNRNFKLAARLLGLDSKLENSLLIPFREIKVECTIPKDDGSLASFVGFRVQHDNARGPMKGGIRYHPEVDPDEVNALAQLMTWKTAVANIPYGGAKGGIGCNPSELSCSELERLTRVFTQKIHDLIGTHTDVPAPDMGTGPQTMAWILDEYSKFHGYSPAVVTGKPIDLGGSLGRDAATGRGVLFATEALLNEHGKSIAGQRFVIQGFGNVGSWAAQLISEQGGKIVAVSDVTGAIKNENGIDIPSLMKHVKENRGVKGFHDGVAIDSNSILVEDCDILIPAALGGVINRDNAKDIKAKFIIEAANHPTDPEADEILAKKGVVILPDIYANSGGVTVSYFEWVQNIQGFMWDEEKVNAELKTYMTRGFKDVKDMCKTHNCDLRMGAFTLGVNRVARATLLRGWEA

SEQ ID NO: 132 - protein, 411 aa, Mesembryanthemum crystallinum
MNALAATNRNFKQASRILGLDAKLEKSLLIPFREIKVECTIPKDDGTLASFVGFRIQHDNARGPMKGGIRYHPEVDPDEVNALAQLMTWKTAVANIPYGGAKGGIGCNPADLSISELERLTRVFTQRVHDLIGTHTDVPAPDMGTNAQTMAWILDEYSKFHGYSPAVVTGKPIDLGGSLGRDAATGRGVMFAAEALLNEYGKSISGQRFVIQGFGNVGSWAAQLIHEMGGKIVAVSDITGAIRNKNGLDITNLFKHVKETRGVKGFSGSDAIDANSILVEDCDVLIPAALGGVINRENANEIKAKFIVEAANHPTDPDADEILKKKGVVILPDIYANSGGVTVSYFEWVQNIQGFMWDEQRVNNELKTYMTRGLKDVKEMCQTHNCDLRMGAFTLGLNRVARATLLRGWEA

SEQ ID NO: 133 - protein, 411 aa, Medicago truncatula
MNALAATNRNFKLASRLLGLDSKIEKSLLIPFREIKVECSIPKDDGTLATYVGFRIQHDNSRGPMKGGIRYHPEVEPDEVNALAQLMTWKTAVANLPYGGAKGGIGVDPSELSASELERLTRVFTQKIHDLIGVHTDVPAPDMGTGPQTMAWILDEYSKFHGHSPAVVTGKPIDLGGSLGRDAATGRGVLFATEALLNEYGKSVSGQRFVIQGFGNVGSWAAQLINEKGGKIVAVSDITGAIKNSNGLDIPSLLKYSKENRGIKGFHGGDSIDPKSILVEDCDVLIPAALGGVINRENANEIKAKFIVEAANHPTDPDADEILKKKGVVILPDIYANSGGVTVSYFEWVQNIQGFMWNEEKVNNELKTYMTKGFKDVKEMCQTHNCDLRMGAFTLAVNRVARATVLRGWEA

SEQ ID NO: 134 - protein, 411 aa, Medicago truncatula
MNALAATNRNFKLASRLLGLDSKLEKSLLIPFREIKVECTIPKDDGTLQSYIGFRVQHDNARGPMKGGIRYHPEVDPDEVNALAQLMTWKTAVANIPYGGAKGGIGCNPSELSISELERLTRVFTQKIHDLIGTHMDVPAPDMGTGPQTMAWILDEYSKFHGYSPAVVTGKPIDLGGSLGRDAATGRGVMFAAEALLNEYGKSISGQRFVIQGFGNVGSWAAQLIDEKGGKIVAVSDITGAIKNSKGLDIPSLLKHTKEHKGVKGFHGGDSFDSNSILLEDCDVLIPAALGGVINRENANEIKAKFIVEAANHPTDPDADEILKKKGVVILPDIYANSGGVTVSYFEWVQNIQGFMWDEEKVNNELKNYMNRGFKDVKDMCKTHECDLRMGAFSLGVNRVARATVLRGWEA

SEQ ID NO: 135 - protein, 411 aa, Nicotiana tabacum
MNALAATNRNFKLAARLLGLDSKLEKSLLIPFREIKVECTIPKDDGSLASFVGFRVQHDNARGPMKGGIRYHPEVDPDEVNALAQLMTWKTAVANIPYGGAKGGIGCSPSDLSNSELERLTRVFTQKIHDLIGIHTDVPAPDMGTNPQTMAWILDEYSKFHGYSPAVVTGKPIDLGGSLGRDAATGRGVLFATEALLKEHGKSIAGQRFVIQGFGNVGSWAAKLINEQGGKIVAVSDITGAIKNENGLNIASLLKHVKENRGVKGFNDARPIDPHSILVEDCDVLIPAALGGVINRDNANDIKAKYIIEAANHPTDPEADEILAKKGVVILPDIYANSGGVTVSYFEWVQNIQGFMWDEDKVNAELKTYMTRGFKDVKDMCKTHNCDLRMGAFTLGVNRVARATVLRGWEA

SEQ ID NO: 136 - protein, 411 aa, Ocimum basilicum
MNALAATNRNFKLAARLLGLDSKLQKSLLIPFREIKVECTIPKDDGTLASFVGFRVQHDNARGPMKGGIRYHPEVDPDEVNALAQLMTWKTAVANIPYGGAKGGIGCNPSDLSISELERLTRVFTQKIHDLIGSHTDVPAPDMGTGPQTMAWILDEYSKFHGYSPAVVTGKPIDLGGSLGRDAATGRGVLFGTEALLNEFGKSIAGQRVVIQGFGNVGSWAAQLISEQGGIIVAVSDITGAIKNPNGLDIPRLVKHVREARGVKGFAGADSIDPDSILVEDCDILIPAALGGVINKDNAKEIKAKFIIEAANHPTDPEGDEILAKKGVVVLPDIYANSGGVTVSYFEWVQNIQGFMWDEEKVNSELKTYMTRGFKDVKEMCRTHNCDLRMGAFSLGVNRVARATLLRGWEA

SEQ ID NO: 137 - protein, 411 aa, Oryza sativa
MNALAATSRNFKQAAKLLGLDSKLEKSLLIPFREIKVECTIPKDDGTLASYVGFRVQHDNARGPMKGGIRYHHEVDPDEVNALAQLMTWKTAVANIPYGGAKGGIGCSPGDLSISELERLTRVFTQKIHDLIGIHTDVPAPDMGTNSQTMAWILDEYSKFHGYSPAVVTGKPVDLGGSLGRDAATGRGVLFATEALLAEHGKGIAGQRFVIQGFGNVGSWAAQLISEAGGKVIAISDVTGAVKNSNGLDIAKLMKHSSENRGIKGFDGGDAIDPRSLLTEECDVLIPAALGGVINKDNANEIKAKYIIEAANHPTDPEADEILSKKGVLILPDILANSGGVTVSYFEWVQNIQGFMWDEEKVNNELKTYMTRGFRDVKEMCRSHHCDLRMGAFTLGVNRVARATVLRGWEA

SEQ ID NO: 138 - protein, 411 aa, Picea glauca
MNALAATSRNFKRAARLLALDSKLERSLLIPFREIKVECTIPKDDGTLASYVGFRVQHDNARGPMKGGIRYHPEVDPDEVNALAQLMTWKTAVANIPYGGAKGGIGCDPRSLSISELERLTRVFTQKIHDLIGVHIDVPAPDMGTNPQTMAWILDEYSKFHGYSPAIVTGKPVDLGGSLGRDAATGRGVLFATEALLAEYGKSISDQRFVIQGFGNVGSWAAELIHEMGGKIVAVSDISGAIKNSNGLDIPALMKHTKTNGGVKGFEAADSVDPKTLLLEDCDVLIPAALGGVLNRENASEVKAKFIIEAANHPTDPEADEILYKKGVIVLPDIYANSGGVTVSYFEWVQNIQGFMWDEEKVNSELKKYMTSSFQHLKEMCKTHDCDLRMGAFTLGVNRVARATLLRGWEA

SEQ ID NO: 139 - protein, 411 aa, Picea sitchensis
MNALAATSRNFKRAARLLALDSKLERSLLIPFREIKVECTIPKDDGTLASYVGFRVQHDNARGPMKGGIRYHPEVDPDEVNALAQLMTWKTAVANIPYGGAKGGIGCDPRSLSISELERLTRVFTQKIHDLIGVHIDVPAPDMGTNPQTMAWILDEYSKFHGYSPAIVTGKPVDLGGSLGRDAATGRGVLFATEALLAEYGKSISDQRFVIQGFGNVGSWAAELIHEMGGKIVAVSDISGAIKNSKGLDIPALMKHTKTNGGVKGFEAADSVDPKTLLLEDCDVLIPAALGGVLNRENASEVKAKFIIEAANHPTDPEADEILYKKGVIVLPDIYANSGGVTVSYFEWVQNIQGFMWDEEKVNAELKKYMTSSFQHLKEMCKTHDCDLRMGAFTLGVNRVARATLLRGWEA

SEQ ID NO: 140 - protein, 411 aa, Populus trichocarpa
MNALVATNRNFKLAARLLGLDSKLEKSLLIPFREIKVECTIPKDDGTLASFVGFRVQHDNARGPMKGGIRYHPEVDPDEVNALAQLMTWKTAVANIPYGGAKGGIGCNPGELSVSELERLTRVFTQKIHDLIGIHTDVPAPDMGTGPQTMAWILDEYSKFHGYSPAVVTGKPIDLGGSLGRDAATGQGVLFATEALLNEHGKTISGQRFVIQGFGNVGAWAAQLISEQGGKIVAISDITGAMKNSKGIDIPSLLKHAKEHNGVKGFHGGDPIDPKSILVEDCDILIPAALGGVINRENANDIKAKFIIEAANHPTDPEADEILSKKGVVILPDIYANSGGVTVSYFEWVQNIQGFMWDEKKVNSELKNYMTKGFKDVKEMCKTHDCDLRMGAFTLGVNRVARATVLRGWEA

SEQ ID NO: 141 - protein, 411 aa, Populus trichocarpa
MNALVATNRNFKRAAKLLGLDSKLEKSLLIPFREIKVECTIPKDDGTLASFVGFRVQHDNARGPMKGGIRYHPEVDPDEVNALAQLMTWKTAVANIPYGGAKGGIGCNPGELSVSELERLTRVFTQKIHDLIGIHTDVPAPDMGTGPQTMAWILDEYSKFHGYSPAVVTGKPIDLGGSLGRDAATGRGVLFATEALLKEHGKTISGQRFVIQGFGNVGAWAAQLISEQGGKIVAVSDITGAIKNNKGLDIPSLLKHANEHKGVKGFHGGDPIDPKSILVEDCDILIPAALGGVINRENASDIKSKFIIEAANHPTDPEADEILTKKGVVILPDIFANSGGVTVSYFEWVQNIQGFMWDEEKVNNELKNYMTRGFKDVKEMCKTHNCDLRMGAFTLGVNRVARATVLRGWGA

SEQ ID NO: 142 - protein, 411 aa, Solanum lycopersicum
MNALAATNRNFKLAARLLGLDSKLELSLLIPFREIKVECTIPKDDGTLASFVGFRVQHDNARGPMKGGIRYHPEVDPDEVNALAQLMTWKTAVANIPYGGAKGGIGCSPSDLSISELERLTRVFTQKIHDLIGIHTDVPAPDMGTNPQTMAWILDEYSKFHGYSPAVVTGKPVDLGGSLGRDAATGRGALFATEALLNEHGKSVAGQRFVIQGFGNVGSWAAKLIHEQGGKVVAVSDITGAIKNEKGIDIESLFKHVKETRGVKGFHDAHPIDANSILVEDCDVLIPAALGGVINKDNANEIKAKYIIEAANHPTDPEADEILSKKGVTILPDIYANSGGVTVSYFEWVQNIQGFMWDEKKVNDELKTYMTRGFKDVKDMCKTHNCDLRMGAFTLGVNRVARATVLRGWEA

SEQ ID NO: 143 - protein, 411 aa, Solanum tuberosum
MNALAATNRNFKLAARLLGLDSKLEQSLLIPFREIKVECTIPKDDGTLASFVGFRVQHDNARGPMKGGIRYHPEVDPDEVNALAQLMTWKTAVANIPYGGAKGGIGCSPSDLSISELERLTRVFTQKIHDLIGIHTDVPAPDMGTNPQTMAWILDEYSKFHGYSPAVVTGKPIDLGGSLGRDAATGRGALFATEALLNEHGKSIAGQRFVIQGFGNVGSWAAKLIHEQGGKVVAVSDITGAIKNEKGIDIESLFKHVKETRGVKGFHDAHPIDANSILVEDCDVLIPAALGGVINKDNANEIKAKYIIEAANHPTDPDADEILSKKGVTILPDIYANSGGVTVSYFEWVQNIQGFMWDEKKVNDELKTYMTRGFKDVKEMCKTHNCDLRMGAFTLGVNRVARATVLRGWEA

SEQ ID NO: 144 - protein, 411 aa, Triticum aestivum
MNALAATSRNFKQAAKLLGLDSKLEKSLLIPFREIKVECTIPKDDGTLASYVGFRVQHDNARGPMKGGIRYHHEVDPDEVNALAQLMTWKTAVANIPYGGAKGGIGCSPGDLSISELERLTRVFTQKIHDLIGIHTDVPAPDMGTNAQTMAWILDEYSKFHGYSPAVVTGKPVDLGGSLGRDAATGRGVLFATEALLAEHGKGIAGQRFVIQGFGNVGSWAAQLITEAGGKVIAISDVTGAVKNSNGIDIAKLMKHSAENRGIKGFDGGDAVDPTSLLTEECDVLIPAALGGVINKDNADAIKAKYIIEAANHPTDPEADEILAKKGVLILPDILANSGGVTVSYFEWVQNIQGFMWDEEKVNRELKTYMTRAFRDTKEMCRSHHCDLRMGAFTLGVNRVARATVLRGWEA

SEQ ID NO: 145 - protein, 411 aa, Vitis vinifera
MNALVATNRNFKLAARLLGLDSKLEKSLLIPFREIKVECTIPKDDGTLASFVGFRVQHDNARGPMKGGIRYHPEVDPDEVNALAQLMTWKTAVANIPYGGAKGGIGCNPGELSLSELERLTRVFTQKIHDLIGVSTDVPAPDMGTNPQTMAWILDEYSKFHGYSPAVVTGKPIDLGGSLGRDAATGRGVLFATEALLHEHGKSIAGQRFVIQGFGNVGSWAAQLISEHGGKIVAVSDITGAIKNSKGIDIPSLLKHSVEHRGVKGFNGADPIDPKSILVEDCDVLIPAALGGVINRENANEIKAKFIIEAANHPTDPEADEILSKKGVVILPDIYANSGGVTVSYFEWVQNIQGFMWDEEKVNNELRTYMTRGFKDVKEMCRTHNCDLRMGAFTLGVNRVARATVLRGWEA

SEQ ID NO: 146 - protein, 411 aa, Vitis vinifera
MNALAATNRNFKLAARLLGLDSKLEKSLLIPFREIKVECTIPKDDGTLASFVGFRVQHDQWRGPMKGGIRYQPEVDPDEVNALAQLMTWKTAVANIPYGGAKGGIGCNPGELSLSELERLTRVFTQKIHDLIGVSTDVPAPDMGTNPQTMAWILDEYSKFHGYSPAVVTGKPTDLGGSLGRDAATGRGVLFATEALLHEHGKSIAGQRFVVQGFGNVGSWAAQLISEHGGKIVAVSDITGAIKNSKGIDIPSLLKHSVEHRGVKGFNGADPIDPKSILVEDCDVLIPAALGGVINRENANEIKAKFIIEAANHPTDPEADEILSKKGVIILPDIYANSGGVTVSYFEWVQNIQGFMWDEEKVNNELRTYMTRGFKDVKEMCRTHNCDLRMGAFTLGVNRVARATVLRGWEA

SEQ ID NO: 147 - protein, 411 aa, Marchantia polymorpha
MNALAATNRYFKQAVRILGIDSKVEKSLLIPYREIKVECTIPKDDGTLVSYVGFRVQHDNARGPMKGGIRYHPEVEPDEVNALAQLMTWKTAVANIPYGGAKGGIGCNPRELSITEQERLTRVFTQKIHDLIGPHLDVPAPDMGTNAQTMAWILDEYSKFHGHTPAVVTGKPIDLGGSLGRDAATGRGVVFGTQALLADHGKTIAGQKYVIQGFGNVGSWTAKILHEQGGIVKAISDVSGAVKNDAGLDIPALVQHVSIHGGVKGFAGGDSLDAASILAEDCDVLIPAALGGVLTRETAKDVKAKFVIEAANHPTDPDADEILAQKGVVILPDIYANSGGVTVSYFEWVQNIQGFMWDEEKVNNELQKYMIRAYANIKDLCKNQNCNLRMGAFSLGVGRVARATMLRGWEA

SEQ ID NO: 148 - protein, 411 aa, Physcomitrella patens
MNALEATNFYFKRAVKLLGLDSKVERSLLIPFREIKVECTIPKDDGTLASYIGFRVQHDNSRGQMKGGIRYHPEVELNEVNALAQLMTWKSAVANIPYGGAKGGIGCNPRDLSPTELERLTRVFTQKIHDVIGPHLDIPAPDMGTNAQTMAWILDEYSKFHGYTPAVVTGKPVDLGGSLGREAATGRGVLYATEALLKDHNLSIRGQTFVVQGFGNVGSWASKLIHEKGGKIKAVSDVTGAIKNNSGIDITALNEHVRMTGGVKGFEGANPLDAAALLAEDCDVLIPAALGGVINGETAKDVSAKFIVEAANHPTDPVADEILAKRGVIILPDIYANCGGVTVSYFEWVQNIQGFPWEEEKVNTNLKKYMEKAYLSIKSTCQTHNCSHRMGAFSLGVGRVAKATLLRGWEA

SEQ ID NO: 149 - protein, 411 aa, Selaginella moellendorffii
MKPLEATNRYFRQAVKILGIDSKLERSLLIPFREIKVECTIPKDDGTLQSFVGFRVQHDNSRGPMKGGIRYHPEADPDEVNALAQLMTWKTAVANLPYGGAKGGIGCNPRDLSIHELERLTRIFIQKIHNVIGIHTDVPAPDMGTNAQTMAWILDEYSKFHGYSPAIVTGKPLDLGGSVGREAATGRGVVYVTEALLADHGKSISNQTFVIQGFGNVGQHTAQLLFEAKGRVKAVSDITGAVKNDSGLDIPALMKHAQENGGVKGFKLGDPIDPSSILMEDCDVLIPAALGGVLNGENANNVKARFIIEAGNHPIEPQADEIFAKKGIIVLPDILANSGGVTVSYFEWVQNKQGFMWDEEKVNMELQRYITNAYNSVKESCKTHNCSLRMGAFTLGVERVARATVLRGWEA

SEQ ID NO: 150 - protein, 637 aa, Arabidopsis thaliana
MFGPTGGLGMNPSMDDMNLIQQAQRHQLVVSNLGEEIDLEIGPGEDDAAFANNSLIGGPPREPSTGEHDETKHMVLVSDLPSEDQDISKGTPAKRKKKVVKRWREEWADTYKWAYVDMKDGTARIFCSICREYGRKHRRNPYGNEGSRNMQMSALEEHNNSLLHKEALRLQTASKDKIVVDKPIYVKTVMSKSAGSIVEGALKRDPNEIEFVQSVQESVHALERVIAKNSHYVNIMERLLEPERMIVFRVPWIDDRGETHVNRGFRVQFNQALGPCRGGIRFHPSMNLSIAKFLGFQQTLKNALSPYKLGGASGGSDFDPKGKSDNEIMRFCQSFMNEMYRYMGPDKDLPSEEVGVGTREMGYLFGQYRRLAGQFQGSFTGPRIYWAASSLRTEASGYGVVYFARLILADMNKEIKGLRCVVSGCGKIAMHVVEKLIACGAHPVTVSDSKGYLVDDDGFDYMKLAFLRDIKSQQRSLRDYSKTYARAKYFDELKPWNERCDVAFPCASQNEVDQADAINLVNAGCRLLVEGSNMPCTAEAVDVFRKANVLIAPAIAAGAGGVAAGEIEVLRESNSMQWSAEDFESRLQEALKQTYEKALKAANDFGYQKESPEALLHGATIAAFLNIAQAMTDQGCV

SEQ ID NO: 151 - protein, 400 aa, Chlorella
MCEPERQITFRVPWLDDSGVLRINRGWRVQFSSAIGPYKGGLRFRDGVNLSIIKFLGFEQMYKNALTTLPMGAGKASGRRGGSDFDPKGKSDSEIQRFCQSFMTELYKYIGGRTDIPAGDIGVGAKEIGYLFGQWKRLTGLWTSSLTGKGLDFGGSEVRPEATGFGAVFFAEAMLEDLGDGLQGKRCIVSGSGNVATFCAMKLIDKGGVVLAMSDSKGYIYEKDGFSQEQLDQIVAIKRSHNGSLAEYTSENVQYFGDRRKPWEIETSIDMAFPCATQNEITLDDARQLTDRGCKYPAAGANMPTTAAAVSHFEQHGVVFGPAKAANAGGVAVSGLEMVQNRVGLQWTREEVCEKLKEIMTKIYTTIKGAAEEYGTTLAAGANIAAFTKVAEVVLAQGGV

SEQ ID NO: 152 - protein, 469 aa, Chlorella
MTVTVVQRHGGANGISFMPERLPPLGGDSEYLEGITHEGLRGVLQQVLERDGAEREFMSAVHEIIFRVPWLDDRGQLQVNRGFRVQFSSAIGPYKGGLRFRDGVNLSIIKFLGFEQCFKNALTTLPMGGGKASRSRRAGGSDFEPKGRSDAEIMKFCQSFMSELYHHIGHYTDVPAGDIGVGAKEIGYLFGQYKRLTRCHTGTLTGKGLEWGGSLMRPEATGFGAVYFAGELLADVGDSLKGKRCIVSGSGNVAQHCAMKLLEEGAVVLAMSDSRGYVYQEEGLTRDQIMEIKGRRSGRLEEYTSPTAQYVGDKGRRVWQLAIPVDMAFPCATQHELDRDDAVALAEHGCKYVFEGANMPCTPAATKVFQDRGIMYGPGKAVNAGGVAVSGLEMSQDRIGLQWSREEPDPALHEWLPVVQVDAKLRGIMRSIYQTAKAAAKEYDVSLAAGANIAGFLKVAEAQLAQGAV

SEQ ID NO: 153 - protein, 513 aa, Emiliania huxleyi
MLHLVLAAASWQGARPVASPRSLRSCAIRQCAVGPLPGSFVVPKVDEVAARLKKEADTGHVPFNPVAEADFVAETLFVARRHDANEGPYIQAVQEVAESLAPLFVREPHYFYLFKTMLEPERMIQFRVPWIDDKGRTRVNRGWRVQWSSALGPYKGGMRFHATVTSGVIKFLGFEQTFKNALTGMSLGSGKGGSDFNPKGKSEAEIMRFCQSFMTALAPHIGPNRDVPAGDIGVGAKEIGYMYGQYKRLKQGEFEGVLTGKDPAWGGSLIRPEATGYGCVYFARAALEAHGQHIAGKRALVSGSGNVAQFTAKKLLALGAKVLTFSDSEGTVHEPDGFTEEQLAQLVAVKQKRGGRVSEYARLSPTAVFLDGERPWSIAADIAFPSATQNEIDDADGAALVANGVVGVFEGANMPSTPEAIARFEERGVIFGPAKASNAGGVAVSGMEMAQNAQRVSWDAETVDRELQAVMTRIHGECHAAAVEYGFGGNLKAGANIAGFKRVADALRDQGAV

SEQ ID NO: 154 - protein, 637 aa, Glycine max
MLLPTSGVGMNSAMDDMNLIQQTQRHHLVVREIGEEIDLEIGAGEDDPSFGNATLIGAPMRESSVEEHGESKQTGMISQLPNDAQDMSKTQQGKRRKKVVKRWREEWADTYKWAYVDMKDGTPRIFCSVCREYGRKHRRNPYGNEGSRNMQMSALEEHNNSLLHKEALRLQMASKDKIVVDKPVYVKVAMSKTAGSILEATLKRDPHEVEFIQAVQEAVQALERVIAKNSRYINIMERLLEPERMIVFRVSWVDDRGETCVNRGFRVQFNQSMGPCRGGIRFHPSMNLSVAKFLGFEQTLKNALSPYKLGGAAGGSDFDPKGKSDNEIMRFCQSFMSEMYRYLGPDKDLPSEEMGVGTREMGYLFGQYRRLAGHFQGSFTGPRIFWSGSSLRPEATGYGLVFFAQLMLADMNKELKGLRCVVSGSGKIAMHVLEKLIAYGALPISVSDSRGYLVDEDGFDYMKISFLRDIKAQQRSLRDYSKTYARSKYYDEAKPWSERCDVAFACASQNEIDQSDAINLVNSGCRILVEGSNMPCTPEAVQILRKASVLIAPAMAAGAGGVVAGELELNHECSLMHWSPEDFESKLQEAMKQTYQRAMKAATDFGYQKESPEALVHGAVISAFLTIAQAMTDQGSI

SEQ ID NO: 155 - protein, 451 aa, Oryza sativa
MAEPEFEQAYKELASTLESSTLFEKNPEYRKALEVVSVPERVIQFRVVWEDDSGKCQVNKGYRVQFNSALGPYKGGLRLHPTVNLSILKFLGFEQIFKNALTGLNMGGGKGGADFDPKGKSDNEIRKFCVAFMTELSKHIGADTDVPAGDINVGGREIGYMFGQYRRLRNQWEGVLTGKGLNWGGSLIRPEATGYGLVYYVDHMINYASGGKESFKGKKVAISGSGNVAQYAALKVIELGGTVVSLSDSKGSLIATEGKGFTPEDISQIAALKLKRQALTALEGHSYNYIEGARPWKHVGNVDVALPSATQNEVSQDEAEALIAAGCKFIAEGSNMGCTQEAIDAFENHRKSNKGSSIWYAPGKAANAGGVAVSGLEMAQNSQRLSWTNEEVDAKLAKIMKDCFENCLATAKEYITPAEGEFPSLVAGANVAGFKKVAAAMHDQGDWWGTA

SEQ ID NO: 156 - protein, 640 aa, Oryza sativa
MDELNLLRQHQHQHQHHLVVRGLGEEIDLEIGPGDDPSFPGAALVGVTPGAHDPADDHKSLLIPCSQPVAEGQPQPTPPQVEEHDGLLRLPGQTKKKKKVVKKWREEWADTYKWAYVAVHDNTSRIFCTVCKEYGRKHRRNPYGNEGSRNMQMSALEEHNNSLLHKEALRLQTASKENAQPPEIERPVYVKALSKTAASILESILKKDPHEAEFIQSIQEVVHSLEPVLVKNSQHVQILERLLEPERCFIFRVPWVDDRGEAHVNRGFRVQFSQALGPCRGGLRFHPSMTLSVAKFLAFEQTLKNALSQYKLGGAAGGSDFDPKGKSESEIMRFCQSFMDELYRYLGPDQDFPAEDVGVGPREMGYLFGQYRRLSGHFQGNFTGPKIFWSGSSFRTEATGYGLVFFARVVLADMNKELKGLRCVISGSGKIAMHVLEKLLSCEAIPVTVSDSKGYLLDTEGFDYMKYSVLRNIKAQQRSLKEYLKSYPNAKYIDDAKPWSEKCDVAFPCASQNEIDQAEALAIINSGCRVLIECSNMPCTAQAVDILRTAKVVVAPAKATAAGGVAVGELELNPEFSLMQWSVEDFENKIQDAVKQTYDRSIKAAQDYGIMKENPESLVHGANICAFLNIAQAMTDQGCV

SEQ ID NO: 157 - protein, 578 aa, Physcomitrella patens
MEEIDLEIGPGYDDATHFDPGATQNLALIAVNDHGMKPTPRKKKKVVKRWRDEWAETYKWAHVAVHEGSHRIFCSVCKEYGRKHRRNPYGNEGSRNMQMSALEEHNNSLLHKEALRLQMASRDKGLGFIERPLYVKVAFIVAAILRRDPYEVEFIQSVQEVLHSLEPVLAKVPQYVHVLERLVEPERVVIFKVPWVDDKGEAHVNRGFRVQFNQALGPYKGGLRFHPTVNLSVVKFLAFEQTLKNSLSSLSLGGGKGGSDFNPKGKSENEIMRFCYSFMDELYRHIGPNQDTPSGDIGVGPREIGYLFGQYRRLTSQYEGMLGPKGIQWGLSNLHPEATGYGVVYFAKEVLANLEKDLKDLRCVVSGAGKVALYAVEKLIAFGAVPITISDTRGYLLDEDGFDRTKLGLIREIKAHNNSLGEYTKLYPRAKYFDDMKPWTVKCDIAFPCATQNELNHADAMSLINLGCQVIIEGANMPCTAEAIDVFRKSKVWFGPGKAANAGGVTIQGLEMAQNTSYVQWTAEEVDMRLQEVMRDIHQKIIKAAQDYGIGNPEALLHGANIASFLRVAQAMLEQGCV

SEQ ID NO: 158 - protein, 621 aa, Populus trichocarpa
MEVSGWFKAEGIRMNSTMDDINLIQQAQRHHLVVRELGEEIDLEIGHGDDDHSFANTPIMGGRPREHSAEDNDEVKNMMASSQFSNEEQDVPKTQPVKRKKKVVKRWREEWADTYKWAYVDVKEGTARIFCSVCREYGRKHRRNPYGNEGSRNMQMSALEEHNNSLLHKEALRLQMASKDKIVVDKTIYVKALMSKTAGSIVEAALKRDPHEVEFIQSVQEAVHALDRVIAKNSHYVNIMERLLEPERMLVFRVPWVDDRGETHVNRGFRVHFNQALGPCRGGIRFHPSMNLSIAKFLGFGQTLKNALSPYRLGGAAGGSDFDPKGKTDNEDLPSEEMGVGTREMGYLLGQYRRLAGHFQGSFTGPRIFWSGSSLRTEATGYGLVFFVQLMLADMNKEIKGLRCAVSGSGKITMHVLEKLIAYGALPITVSDSKGYLVDEDGFDYVKISFLRDIKAQQRSLRDYSKTYARSKYYDEAKPWSERCDVAFPCGYQNEIDQSDAMSLVNSGCRILVEGSNMPCTPEAVDVFKKANVLIAPAIAAGAGGVVAGELELNHECNLLNWSPEDFESKLQEAMKQIYQRALKAANDFGYQKESPEALVHGAVISAFLTIAQAMSDQGCV

SEQ ID NO: 159 - protein, 450 aa, Phaeodactylum tricornutum
MSTRGDLDFLDDLRRKYPHQPTFLQAVEEMALALSDLFDGPDGDFYQRAFLAMAEPERIIAFRVSWMDDNGKIRFNRGWRVQFSSVLGPFKGGLRFHPTVDEGVLKFLGFEQIFKNALTGLPLGGGKGGSDFDPKGKSDGEVRRFCEAFMSELCRYLHPSTDVPAGDIGVGGREIGYMYGQYKRITNRHGVGVLTGKSMNFGGSEIRPEATGYGLIYMTKIAVQRKLNRNLTDMRCAISGSGNVAQFAAKKLLEFGAKVMTVSDSNGVIVFESGMTATDWDAVSDCKNKHRGRLSSIQDKVSGQYYDGESPWSLDIKYDLALPCATQNEIDEKSARQLVKNGVLGVLEGANLPTDLEAQAVFRKADGVIYVPGKASNAGGVGVSGLEMSQNAQRLTWKSEKVDEKLHGMMDEIYSMMEEAELSGGTLEQGANRAGFLKVATAMRELGWVY

SEQ ID NO: 160 - protein, 650 aa, Sorghum bicolor
MNSMDEINLLRQAQRQHQHHLMVRGIGEEIDLEIGPGDDPSFSGASLVAVTSTHDAVVHADDHKSLLIPCSQTGAADGLAPQQQHLAQGEEEHDGMLRQPSGHTKKKKKVVKKWREEWADTYKWAYVAVHDNTTRIFCSVCKEYGRKHRRNPYGNEGSRNMQMSALEEHNNSLLHKEALRLQMASKEKLQPPEIERPVYVKALSKTAASILECVLRRDPHEAEYIQSIQEVVHSLEPVLVKNTQYIQILERLLEPERCFIFRVPWIDDRGEAHVNRGFRVQFSQALGPCRGGLRFHPSMSLSVAKFLAFEHTLKNALSLYKLGGAAGGSDFDPKGKSDNEIMRFCQSFMDELYRYLGPDQDFPAEDIGVGPREMGYLFGQYRRLSGHFQGNFTGPKIFWSGSSFRTEATGYGLVFFARILLAEMNKELKGLRCVISGSGKIAMHVLEKLLPCGAIPVTVSDSKGYLLDEDGFDYMKYSLLRDIKAQQKSLKEYLKSYPHAKYIDDAKPWSEQCDVAFPCASHNEIDQGEAVAIINSGCRVLVECSNMPCTVQAVDILRKAKVIVAPAKATAAGGVALGELELNPEFNLMQLSVEDFENKIQDAIKQTYERSIKAAQDYGIMKESPESLVHGANICAFLNIAQAMADQGCV

SEQ ID NO: 161 - protein, 634 aa, Selaginella moellendorffii
MDLLGGQVRSPGNHHHHHGLGGAVEEIDLEMGAAAGVVDDASFARAAFAVVSSSPEASANQQAMHHVLDGSPSSQELSAQLLSSDKPRKKKKVVKKWRDEWADTYKWACVQMVEGSSRIFCSVCKEYGRKHRRNPYGNEGSRNMQMSALEEHNNSLLHKEALRLQLASKDRGITLLERPIYIKALLSKSAESIIETVIRRDPHESEYIQAVQEIVHSLEPVLSKNIQYLHVLESLLEPERVIIFRVPWVDDKGEKHVNRGFRVQFNQALGPYKGGLRFHPSVNLSVLKFLGLEQTLKNALSTFSFGGAEGGSDFDPKGKSDTEVMRFCQSFMDELFHHIGPNQDTLTGDIGVGFRELGYLYGQYRRLTGEFECALVGGRNLLANSNLHAEAAGHGLVYYAKHVLADLNRDIKGLRLCLISGSGKLAMHVMEKLIAVGAVPVSLSDSKGFLLDDEGFDGSKAMFLKDMKSQQKPLREYTRRYVRAKYFDDARPWGEKCDLAFPCATQNELNHSDALAIISSGCHVIVEGSDMSCTAEAIDVLRKSKIIVAPSKAANAGGVAVSGLEMASKSNQMHWTGEEVDTKLQELMRDIYQKSVAAAAACGHSKDGPEALVHGANVAGFLRVAQAMLEQGCV

SEQ ID NO: 162 - protein, 636 aa, Vitis vinifera
MLLPVGGLGMNSTMDDMNLIQQRHHLVVRELGEEIDLEIGPGDDDPSFANTPLIGGPPREPSAEEHDESKQVVMVSQLSSEDQDASKMQPVKRKKKVVKRWREEWADTYKWAYVDVKEGTARIFCSVCREYGRKHRRNPYGNEGSRNMQMSALEEHNNSLLHKEALRLQMASKDKIIVDKPIYVKALMSKTAGSIVEAALKRDPHEVEFIQSVQEAVHALERVIAKNSHYVNIMERLLEPERMILFRVPWVDDRGETHVNRGFRVQFNQTLGPCRGGIRFHSSMNLSIAKFLGFEQTLKNALSPYKLGGAAGGSDFDPKGKSDNEIMRFCQSFMNELYRYLGPDQDLPSEEMGVGPREMGYLFGQYRRLAGHFQGSFTGPRIFWSGSSLRTEATGYGLVFFAQLMLADMNKELKGLRCVVSGSGKIALHVTEKLLAYGALPITVSDSKGYLVDEDGFDYMKISFLREIKSQQRSLRDYSKTYARSKYYDEAKPWSERCDVAFPCASQNEIDQSDAINLVNSGCRILIEGSSNMPCTPEAVDVLRKANVLIAPAMAAGAGGVAAGELELNHECNLMHWSPEDFESKLQEAMKQTYQRALKAAADFGYQKESPEALVHGAAISAFLTIAQGMTDQGCV

SEQ ID NO: 163 - protein, 450 aa, Chlamydomonas reinhardtii
MASALLACGRQLSCALGGLSLGHQALGAIGGAFRRHASSHAENTNTFLREALVKLDYPEKLQNLLLTPRREMSVELVVQMDDGQIEVFNAYRVQHNNARGPYKGGLRYHPQVDLDDVRSLASLMTWKTAVMDIPYGGAKGGVTVDPRKLSERELEKMTRKLVVAIKEIIGTYEDIPAPDMNTDAKVMAWFFDEYSKYKGFSPGVVTGKPVYLHGSLGREAATGRGTTFAIRELLKALHMGKIADQKYVIQGFGNVGAWAAQLLWEAGGKVVAISDVAGAVHNEQVRGLDIGALRKHVASGKPLAEFTGGAAVPKQDILLHPCDVLIPAAIGGVIGPEEAKKLQCKVVVEAANGPTTPEGDMVLRDRGITVLPDIYTNGGGVTVSFFEWVQNLQNFKWEEDDVNRKLDRKMADAFAALWAVHKEMNVPLRTAAFVVALQRVTRAEVHRGFD

SEQ ID NO: 164 - protein, 455 aa, Chlorella
MALALGRLQGAGLSRLLPSVAAGLETCGARRATDGAELHQRRTKMSHSEATNFYINEALEHLEYPKRLRKLLLTPEREVAVELALLRDNGEVATFNAYRVQHDNSRGPYKGGLRFHPDVDLDDVRSLASLMTWKTAVMDIPFGGAKGGVCVDPRDLSERELEILTRKLVQALRPILGTYEDIPAPDMNTGAREMAWIFDEYTKFAGFSPGIVTGKPVWLHGSLGREAATGRGTVFAIRELFKAQGLGEIKNKSFVIQGFGNVGSWAAQILYEMGGRVVAVADAFGAVANEHGLEVPELRRHLADRHSLASFSGGVVLPKEAILTVPCDVLIPAAIGGVITEENAADLQCKIVVEAANGPTTPEADQILRQRGVTVLPDIYTNGGGVTVSFFEWVQNLQNFKWSEEEVNSKLDRVMVEAFQGIWELHTEDKIPLRVAAFVKALQRVTRARVHRGFD

SEQ ID NO: 165 - protein, 462 aa, Chlorella
MTPALAMPPLPLDLHAAEEMQVEGEWKVAAAPPSNPASARKLVMRTPRQHASAAANTNKFICEALEHLDLAPSQRRLLMSPQREVAVTLSLLRDSGEVATFDAYRVQHDNSRGPFKGGLRFHPHVDLDDVRSLASLMTWKTAVMDIPFGGAKGGVCVDPSELSTRELEILTRKLTQALRPVLGDHTDIPAPDMNTGAREMAWFFDEFSKTAGFTPGIVTGKPVWLHGSLGREAATGRGTVFAIRELLKAQGQGEIAGKSFVIQGFGNVGSWAAQILHQQGGRVVAVADAFGAVANLERGLDIPALCQHLAAKGGLAAFPGGTEMAKEAILAVPCDVLIPAAIGGVITEDNAHTLQCKIVAEAANGPTTPEADAALRRRGIAVLPDIYCNGGGVTVSYFEWVQNLQNLRWSEEEVNSRLDRVMTDAFRAIWQLSQRDSIPLRVAAFAIALERVMQARMNRGFD

SEQ ID NO: 166 - protein, 405 aa, Volvox carteri
MAASLSQFRYASSHAENTNKFLREALNRLDYPEKLQNLLLTPRREMSVELVVQMDDGKIEVFNAYRVQHNNARGPYKGGLRYHPQVDLDDVRSLASLMTWKTAVMDIPYGGAKGGVTVDPRKLSERELEKLTRKLVVMAWFFDEYSKYKGFSPGVVTGKPVYLHGSLGREAATGRGTTFAIRELLKALHMGKLADQKYVIQGFGNVGSWAAQLLWESGGKVVAVSDVAGAVANENVSGRACGLDIGELRKHMAAGKTLASFPGGVALPKEDILAQPCDVLIPAAIGGVIGPEMAARLQCKVVVEAANGPTTPEGDLVLRDRGITVLPDIYTNGGGVTVSFFEWVQNLQNFKWEEEDVNRKLDRKMTDAFAALWGVHKEMGVPLRTAAFVVALQRVTRAEVHRGFD

SEQ ID NO: 167 - protein, 454 aa, Volvox carteri
MERAVASMAGLARSCRALGAAASTSLQHFCTTTTPTYGRTSVYVKEASEAAFNILDFDPQVEKAILNPDREVKVNLVVPMDNGEVNMYDAYRVQHNNVLGPFKGGIIFHPAVNLENMRSLASLNTWKFALLNVQFGGSKGGVAVDPRTLTDREVEKLTRKYVQALQEVIGPRTDIPAPDINTDERHMAWIFDQYSKLRGFTPAAVTGKPTWLHGIVGRDSAGGRGAAYSTREFMTRTLRRKVAGSSFLIQQGFGKLGSWTAQILQQELGAKIVGVSCSETAVYNENGLDIAALRAHVVQGGLLKDFAGGTGVPNDDNFLDLPADVLIPCAVDGTIHKDNVARCLHFKAVVEAANSALTPDADAVLREHGIPVLPDIYANGGAVIVSFFEWVQNNQNLQWEEDEVKRELDRYLTDAYNALLREQEQYGTSLSLRTAGYLVALKRLQQAELVRGHS

SEQ ID NO: 168 - protein, 530 aa, Physcomitrella patens
MTMAIRLIKGASSTRGPFALLCAAAGARIRYSTAAAVSSTTTTVTSTTTTPAGHGAIAHGDPSFLESVDIYFDKAAAIASTTPDILAQIKACNNILKVQFPLKCANGTVELIEGYRAQHSHHRLPVKGGIRMAPNVDADETMALAALMTFKCAVVDVPFGGAKGGIKIDPTKYSMNEKEAIIRRYTSELVRKNFIGPSIDVPAPDYGTGPQEMAWIKDTFEHLQPNDINGSACVTGKPLEEGGIDGRTEATGLGVFFCLREFLNDETLVARLGMTKGIKGKTFIVQGFGNVGRHTVDYIHGAGGKIIAIAEADGGLVDESGDGLDIPAVKAYHKKKGTITGFPGAKTMKFAPSILELPCDVLIPAALESQIHSGNAGNIKAKIVAEAANGPVTPLAETILEDNDVVILPDLLLNAGGVTVSYFEWLKNLNHIHFGRMSKRMEERGKRVLIDALENEFGNGHRFSDTVRSQVVKGNTEVDFVWSGLEETMLSSWECVKKIAEERKCNFRTAAYLIAIERIATCYRVSGIFP

SEQ ID NO: 169 - protein, 583 aa, Selaginella moellendorffii
MYWGGQNDSDEHTPSNGPQSTPARLDLTRKVLTSTGVTPPGGFEPPTTREREQCVAPGRALPGQASGFHSSLADCVMEMLLRRSSILSKRCIPAVLALPRNLSSLVTGDAAFLEAVDIYYDKAAALASPTPDILAQIKGCNNILKVQFPLKCSDGTVELIEAYRAQHSHHRMPVKGGIRMAPNVDAEETMALAALMTFKCALVDIPFGGAKGGIKIGGNDPYPAKYSTGEKEAIIRRYTSELVKKNFIGPAIDVPAPDYGTGSQEMAWIKDTYEHLQSTDINGTACVTGKPLEEGGIHGRQEATGLGVFFCLREFLDDEGLISKLQMKPGIEGKTIIVQGFGNVGQHTIDCIEDAGGRIIAIAEKDGGVVDETGKGLNIKEVKDYFKRKGTITGFPKGSTVEDSSKILELPCDVLIPAALESQIHSGNASFIQARIIAEAANGPVTPAAEAILEKRGVVILPDLLLNAGGVTVSYFEWLKNLNHIHFGRMSRRMEERGKRVFLEALELEFGNGNRLSDELRRELVKGNTEVDFVWSGLEETMLVAWDKVKAVAAKKGCNFRTAAYLIAIERIATCYKVSGIFP

SEQ ID NO: 170 - protein, 242 aa, Brassica napus
MNWKMDVADIPYGGTSEHGVVYATEALLAEYGKSIKGLTFVVQGFGNVGTWAVKLIHEKGGKVVAVSDITGAVRNPEGLDIDALLSHKEATGSLVDFSGGDAMDSNELLIHECDVLIPCALGGVLNKENAGDVKAKFIIEAANHPTDPDADEILSKKGVIILPDIYANAGGVTVSYFEWVQNIQGFMWEEEKVNLELQKYMTRAFHNIKSMCHTHSCNLRMGAFTLGVNRVARATQLRGWEA

SEQ ID NO: 171 - DNA, 1275 bp, Lycopersicon esculentum
aggcttaaacaatgcagcttccgtcgtcggccaccgtggctgcggtggttctctccgtagtcctttttatttgtgccactgaagctcataacattactcacattctagccgaccataaacagttctccactttcaaccattacttaacaactacacacctcgccgctgaaattaaccgccggcaaaccatcactgtttgtgctgtagataatgccggaatgtcagatctactctccaaacaactatctatctacactataaaaaacgttctctcttttcgcgtgcttctcgattacttcgacgctaaaaagcttcaccagattactaacggcacggcacttgccgccacaatgtttcaagctaccggctcagctaccggatcttctggattcgtaaacattactgatctaagaggaggtaaagtcgggctcagtccggctgattacaacggtcctcctccggctaaatttgtaaaatcaatcgccgagattccttacaacatctccgttattcaaataagtacgattttaccctcagacgaagctgaagctccgactccaggaccaagccaaatgaatctcacttctctaatgtcagctaaaggctgcaaagttttcgccgagactctattagcttctccggctgaaaaaacgtttgaggataacgttgatggcggagtaacaatattttgtccacgagatgatgcaatgaagaaatttttgcctaaatttaagaatttaacagcggaagggaagcaatcactgctcgaatatcatggaattcctatataccaatcgatttcgaatttgaaatcgaataatggagatatgaacactttagctactgacggagctaagaagtacgctgtagtcattcaaaatgacggtgaagatgttactataaaaacgaaaattgtgacggcgaagatcacggctactgtggttgataaactgccattagcgatttactcgcttgataaggtgttattacccgaggaattgttcaaggctagtcctactccggcgccggcgccggcaccggaggcacgtgctgaatctcctaagcactccaagtcaccaccggcacctgcatctccggctgagtctccagcggattctccggcggatggtcccaacggtgatgctgatgatttgacagatagcggtgctgttaagtacaatgccggagcatcacttgccgccgttttcagtttatggtttgccttcaacgtgttgatggaagtttgaaaaagaaacccagctttcttgtacaaag

SEQ ID NO: 172 - protein, 411 aa, Lycopersicon esculentum
MQLPSSATVAAVVLSVVLFICATEAHNITHILADHKQFSTFNHYLTTTHLAAEINRRQTITVCAVDNAGMSDLLSKQLSIYTIKNVLSFRVLLDYFDAKKLHQITNGTALAATMFQATGSATGSSGFVNITDLRGGKVGLSPADYNGPPPAKFVKSIAEIPYNISVIQISTILPSDEAEAPTPGPSQMNLTSLMSAKGCKVFAETLLASPAEKTFEDNVDGGVTIFCPRDDAMKKFLPKFKNLTAEGKQSLLEYHGIPIYQSISNLKSNNGDMNTLATDGAKKYAVVIQNDGEDVTIKTKIVTAKITATVVDKLPLAIYSLDKVLLPEELFKASPTPAPAPAPEARAESPKHSKSPPAPASPAESPADSPADGPNGDADDLTDSGAVKYNAGASLAAVFSLWFAFNVLMEV

SEQ ID NO: 173 - DNA, 960 bp, Allium cepa
  misc_feature (752)..(752): n is a, c, g, or t
  misc_feature (777)..(777): n is a, c, g, or t
  misc_feature (877)..(877): n is a, c, g, or t
  misc_feature (905)..(905): n is a, c, g, or t
  misc_feature (927)..(927): n is a, c, g, or t
cgattctccaataatggcctccttcctcctcctcctctccctcctcctcctctctccgtcgatcctaaccgtttccgcccacaacattaccgcaatgctcgaatcctaccccgactacagcctcttcaatagctatctcacccaaaccaaagtctccgatgagatcaactcccgcaccacggtcaccgtccttgccctccccaactccgccatgtcctccctcgccgccaagcataccctagccggtatcaaaaacgccctccgcctcctcgtcctcctcgactactacgaccccaccaaacttcatgatctccctcgtggaaccactctcaccaccaccctctaccagaccaccggcaatgcccccggcaactctggattcgtcaatatcactaatctccgtggcggtaaagttgccttcggcccctccgctcctaactctaaattgatgtccgattacactaaatccgttaagcagttgccctacaacatcttccgtcatcgaagtttccaaccctatcacttttccaggtcttctagatgccccatctgctgcgaccgcaaacatcactgcgctcctagaaaaggctggatgcaaaacctttgccaaccttattcagaacttctggtgtactgaaaatcttcgagacagctgaagataaaggccttacgctatttgccccaaacgatgaagcgtttaagggcgaaaggagttccagaatctggagtacgttgagtagtgtggagcttgncactttgttgcaagtaccatgcggnacctagctacattccgaagccactctaaaaaactcggacaagtctatttcaacaatggcgactaacggggctggtaaatacgcgctgaaggtaaaagtcngcaggagatgatgtgagtcttgatacangaatggatactttcagaatagnccgagaccggtcttgacgacacctccgggttgc

SEQ ID NO: 174 - protein, 207 aa, Allium cepa
MASFLLLLSLLLLSPSILTVSAHNITAMLESYPDYSLFNSYLTQTKVSDEINSRTTVTVLALPNSAMSSLAAKHTLAGIKNALRLLVLLDYYDPTKLHDLPRGTTLTTTLYQTTGNAPGNSGFVNITNLRGGKVAFGPSAPNSKLMSDYTKSVKQLPYNIFRHRSFQPYHFSRSSRCPICCDRKHHCAPRKGWMQNLCQPYSELLVY

SEQ ID NO: 175 - DNA, 914 bp, Arabidopsis thaliana
actatactcaaaacacataaactcatcttcaaaactcaatggccaccactcctctcctcctccttctcctcaccgccgtcttcctctccacggagataaccgctcaacgcgctgctccggctcctggcccggctggtcccatcaacatcacggcaatcctcgaaaaaggcggacaatttgttactcttatccgtcttttaaacacaactcaaataggaaaccagataaacatccaaatcaacagttcatcagaaggcatgaccgtgttagcaccaacagacaacgctttccaaaaccttaaacccggaaccctaaacaaactaagcccggacgaccaagtcaaactcattctttaccatgtcagtcccaaattctacacattggaagatcttctctctgtaagtaacccggtcagaactcaggcttcaggtcgagacgttggtggggtttacggacttaacttcaccggtcaagggaatcaagtcaatgtatctactggtgtcgttgagacacgtctcagtacttcattgagacaagaacgtcctcttgcggtttacgtggtggacatggtattgttgccggaagagatgtttggagaacgtaagatctcaccgatggcgcctccaccaaaatcaaaatctcctgatgtctcagatgattcagagtcctctaagaaagcggctgctccgtcagagtcagagaagtctggctccggtgagatgaatactggattagggcttggtcttggacttgttgtgttgtgtttgaaattcctcctttgagtttgtttatatatattgatttaattgtgcgggttgtaataagaaatttctatatgtttattatgatgcatgatttgaaaactgaaataagagattattatttcgtgtgcatatatatgtattttctgaaat

SEQ ID NO: 176 - protein, 420 aa, Arabidopsis thaliana
MAASQTFSLLAFTFSLLAFASTVSSHNITQILADSPDYSSFNSYLSQTKLADEINSRTTITVLVLNNGAMSALAGKHPLSVIKSALSLLVLLDYYDPQKLHKISKGTTLSTTLYQTTGNAPGNLGFVNITDLKGGKVGFGSAASGSKLDSSYTKSVKQIPYNISILEIDAPIIAPGVLTAPAPSASLSNITGLLEKAGCKTFANLLVSSGVLKTYESAVEKGLTVFAPSDEAFKAEGVPDLTKLTQAEVVSLLEYHALAEYKPKGSLKTNKNNISTLATNGAGKFDLTTSTSGDEVILHTGVAPSRLADTVLDATPVVIFTVDNVLLPAELFGKSKSPSPAPAPEPVTAPTPSPADAPSPTAASPPAPPTDESPESAPSDSPTGSANSKSANAAVGVSTPSLFTALVTIAAIAVSVSLCS

SEQ ID NO: 177 - DNA, 1970 bp, Arabidopsis thaliana
aaaactcacatctatctctatctctcttctctgtctctcactctccactttccgatcaccgacgattcaacaaaacatagtaaaaaacaaagcaaattctttttttctccttagttacttcttctacagattatctcaatcttacagagcaccatggatcgttgtatctatggttgctccgtcattactatcttcttctccttcttcttcctcctcaatgcatccgctttagaatcgggtcaccacaacataactgggtcgggtcaaataaactcaaactccgtcctcgtagctctcctcgattctcgttacactgaactcgccgagctagttgagaaggctcttcttctccaaaccctcgaagacgccgttggtcgtcacaatattactattttcgccccacgcaatgaagcactcgagcgtgaccttgacccggattttaaacggttcttgctccaaccaggtaacctcaaatctctccaaacgcttctcttgtctcacattatccccaaacgagtcgggtcaaaccaatggcctgaggagaattcgggtcgggtcaaacacgtcacgttagggcatgaccaagtgctgcatttgagtaaactcaaaggaacaaatggaaagagattggtgaattccgctgtaattacccgacccgatgatttaacccgacccgacgggttgatccacggaatcgaacggcttttaatccctcgttccgttcaagaagatttcaaccgacggagaaatctccgatcaatctccgccgtattacccgaaggagctccggaaatcgacccgagaaccaaccgtctcaagaaatctgccaccgccgtctcagtacccgccggatctccaccagtgcttccgattgaatccgctatggctccaggtccatcgctagctccggctccggctccaggacctggaggtgcacacaaacatttcaacggcgatgctcaggtcaaagatttcatccacacattgttacattacggtggatacaacgaaatggcggatattctcgtgaatctgacgtcacttgcgacggagatgggtcgattggtgtcagaaggttacgtcctcaccgtgttagctccgaacgatgaagctatggggaaattaacgactgatcagcttagcgagcccggagctccggagcaaattatgtattaccacattattccagagtatcagacggaggaaagcatgtataattctgttaggagatttgggaaggtgaagtatgaaacgctgcgttttcctcacaaggttggggctaaagaagctgatggctcggttaaattcggttctggtgaccggtcggcttatttgtttgatccggatatttacaccgatggtcgcatttcggttcaggggattgatggtgttttgttcccagaggagaaggaagaagagacggttaagaaaccgaccggtccggttaagaaagttgttcagccgagaagagggaagttgctggaagtagcatgtagtatgcttggagctattgggaaggactcatatctaagcagatgctgatgaattcacaaacctgaagagattattgaaggaaaatctctcaagtgttatctgtaaacacacacaaaaggttctttggagcagaatgaaagatttagaagaagagcaaaaaaaaaaaaaaaaaacaagagagtaatacatcaatgtccaaaacttcaaaagaatattcttcagtggaatatgagaatagggtttgttgagtttttttatataaaaaatattttttttgggtggggttttgattttggggttataaatactgtaattagatataagaactcattttttcaattgatttggtgtatgaaaaatgaatcaaaaagtggggagcaaaagaaaaagtcttgagaacccaccaccactttctttcttctacttggtcctttatttgtgaatggtttggtaagtaaaatttccacttaattgag

SEQ ID NO: 178 - protein, 254 aa, Arabidopsis thaliana
MAKMQLSIFIAVVALIVCSASAKTASPPAPVLPPTPAPAPAPENVNLTELLSVAGPFHTFLDYLLSTGVIETFQNQANNTEEGITIFVPKDDAFKAQKNPPLSNLTKDQLKQLVLFHALPHYYSLSEFKNLSQSGPVSTFAGGQYSLKFTDVSGTVRIDSLWTRTKVSSSVFSTDPVAVYQVNRVLLPEAIFGTDVPPMPAPAPAPIVSAPSDSPSVADSEGASSPKSSHKNSGQKLLLAPISMVISGLVALFL

SEQ ID NO: 179 - DNA, 1572 bp, Arabidopsis thaliana
ccacttcctctgctccacactgacacttgaaaaaactcaaaaccgtctcatcatggcggcgtcacagacattctcactcctcgccttcactttctccctcctcgcctttgcttccaccgtgagtagccacaacatcactcaaatcctcgctgattctccagattactcttccttcaacagctacctttctcagacgaagctcgccgacgagatcaacagccgcacgacgattacagttctcgtccttaacaatggcgcaatgtctgctctcgccggaaaacatccactctccgttattaaaagcgctttaagcctcctcgtcctcctcgattactacgatccacaaaaactccacaagatctccaaaggcacaactctctccaccacactttaccaaaccaccggaaacgctcccggaaacctaggattcgtcaacatcaccgatcttaaaggaggcaaagtcggatttggctccgccgcttcaggttccaaactcgattcatcttacaccaaatccgttaaacaaatcccttacaacatctcaatcctcgagattgatgctccgatcatcgctcccggagttttaaccgctcctgctccttccgcctccttgtcaaacatcaccggattactcgaaaaagccggttgcaaaacctttgctaatttgcttgtctcaagtggagtactcaagacttacgaatccgccgttgaaaaaggcttgacggtttttgcaccgtccgatgaagcttttaaagctgaaggtgtaccagatctgacgaagctcacacaagctgaggtagtctcgctcttagagtatcacgccctcgctgagtataaacctaaaggctcattgaagactaacaagaacaatatctccacgttagccactaacggcgccggaaaattcgatctaacgacctctacctccggcgacgaagttattctccacaccggcgttgctccgtcgagactcgcggacactgtgctcgacgcgactccggttgtgatattcactgtggataatgtccttctccctgctgagctattcggaaaatctaaatctccatctccggcaccggcgcctgagccagttaccgcaccgacaccatctccagcggatgcaccttcacccaccgcagcttcaccaccggcacctccgacggacgagtcaccggaaagtgctccttcagactcgccaacaggttcagcgaacagtaagtcagctaacgcagcggttggcgtgagcacaccgtcgttgttcaccgcattggtcacgatcgccgccatagccgtctccgtgtctctctgctcttaaaacctttcgtaattacgcaggctgccactccctttgtttatttttaatttaattatcttttcaatttttatttttgtggttatgtgttgttgagtttgaaaacatgggattagtgagtgaggttttatttaaatcgtttgttaatcacattttcattattgctttcagtgttgatctgatagtatcttgttgagatctttggctttcacttatttaacttcttttccatttttggataaagtgctttttcttctaat

SEQ ID NO: 180 - protein, 436 aa, Arabidopsis thaliana
MDDLSKLLFFLLLTISITTALPDKPGSGQINSNSVLVALLDSHYTELAELVEKALLLQTLEEAVGQHNITIFAPRNDALEKNLDPEFKSFLLQPKNLKSLQSLLMFHILPKRITSPQFSSAVVSHRTLSNDHLHFTNGKVNSAEITKPDDLTRPDGIIHGIERLLIPRSVQEDFNRRRSLRSIAAVLPEGAPEVDPRTHRLKKKPAPIPAGAPPVLPVYDAMSPGPSLAPAPAPGPGGPRHHFNGEAQVKDFIHTLLHYGGYNEMADILVNLTSLATEMGRLVSEGYVLTVLAPNDEAMAKLTTDQLSEPGAPEQIMYYHIIPEYQTEESMYNSVRRFGKIRYDSLRFPHKVEAQEADGSVKFGHGDGSAYLFDPDIYTDGRISVQGIDGVLFPEEKTPVEKKTGVPVVKKAPKPRRGKLMEVACTMLGSQFPTCQ

SEQ ID NO: 181 - DNA, 908 bp, Arabidopsis thaliana
acacacaacaactacaacaatggctacttcaagaacattcattttctctaatctcttcatcttcttcctcgttatagccactacttatggtcaggctccagctccaggcccttcaggtccaacgaacataaccgcaatcctagaaaaggctggtcaattcacattgttcataagacttcttaaaagcactcaagcctcagaccaaatcaacactcagctcaattcttcctcgagtaatggcttaaccgtgtttgccccgactgataacgccttcaacagcctcaaatccggaaccttaaactcattgtctgaccaacaaaaagttcagcttgttcagttccatgtcttacctacactcataaccatgcctcagtttcaaaccgttagtaaccctttacgcacgcaagctggagatggccaaaacggtaaattccctcttaacatcactagctccggtaaccaagttaacatcaccactggagttgtcagcgccaccgtggctaactctgtctacagcgataagcagctggccgtttatcaggttgatcaagttttgctgccattagccatgtttggatcaagcgtggctcctgctccggcccctgagaaaggcggctctgtttcaaaaggctcagcttccggtggcgatgatggaggagattctactgattcatctgatgcagagaggactggattcgggtttgggatcagaatcactaccgttgcagccattgctgcttcttcttctctgtggatataactcgagagagagcttttcttgagtctccacatttggaattttaagaataacgagagctttaagtttttgttgtactttgagattgttttatagatgtgttattacgtgtgattgttttgattaagattgcacacaactttttttgatg

SEQ ID NO: 182 - protein, 247 aa, Arabidopsis thaliana
MATTRLTLAPLLLIAAVLLATKATAQPAAPAPEPAGPINLTAILEKGGQFTTFIHLLNITQVGSQVNIQVNSSSEGMTVFAPTDNAFQNLKPGTLNQLSPDDQVKLILYHVSPKYYSMDDLLSVSNPVRTQASGRDNGVYGLNFTGQTNQINVSTGYVETRISNSLRQQRPLAVYVVDMVLLPGEMFGEHKLSPIAPAPKSKSGGVTDDSGSTKKAASPSDKSGSGEKKVGLGFGLGLIVLCLKFLF

SEQ ID NO: 183 - DNA, 1603 bp, Arabidopsis thaliana
aaataaataaactcaaaaccattcttcatttcgccgacactttcttctccaccaccaccatggatgatctctccaagcttctcttcttcctcctcctcactatctccattaccaccgcattacccgataaacccgggtcgggtcaaataaactcaaactccgtcctcgttgctcttcttgactcacactacacagaactagcagagctcgtcgaaaaagctcttcttctccaaaccttagaagaagctgttggtcaacacaacatcacaatctttgctcctcgtaacgatgccttagaaaaaaatcttgatcctgaattcaaatctttcttactccaaccgaaaaacctcaaatcattacaatctttattaatgtttcacattcttcccaaaagaatcacttctccacaattctcctccgccgtcgttagccaccgtactctctccaacgaccacctccatttcaccaacggaaaagtcaactccgctgaaataaccaaacccgatgatttaactcgtcccgatggaatcatccacggaatcgaacgtcttttaatcccacgttctgttcaagaagatttcaaccgccgtcgtagtctccgttcaatcgctgccgtattaccggaaggagcaccggaggttgatccaagaactcaccgtctcaagaaaaagccagcaccaattcccgccggagctccaccggttcttccggtttacgacgcaatgtcacctggtccgtcactagctccggctccggcaccaggaccgggtgggccacgccaccatttcaacggagaggctcaagttaaagattttatccacacgcttcttcattacggtggctacaatgaaatggcagatattctcgttaatctcacttctttagccaccgagatgggtcggctcgtgtcggaaggttacgttttaaccgttttagcaccaaacgacgaagctatggctaaattgaccacggaccaattgagcgaaccgggagctccagagcaaattatgtattatcacatcataccggaataccaaaccgaagagagtatgtacaattctgtacgccggtttgggaaaatccggtacgattcactccggtttcctcataaagtagaggctcaggaggcagatggttcggttaagttcggtcatggtgatggttcggcttatttgttcgatcctgatatttataccgatggacggatttcggttcaagggattgacggtgttttgttcccggaggaaaaaactccggtcgagaagaaaaccggcgttccagttgtcaagaaagcacctaaaccaagaagaggtaaattgatggaagtagcatgtacaatgctgggatcacaatttccaacatgtcaatgagatcaaattaaatccgggacatgagaattttataattctgtaaacatgtgataaaaatgtgaacagaaaaaagaaataatgtaaatgattatttttttgggctcgttgcaatatgattgttaaattgtaattttcagttgttttgagctgacgtaaccaaaccagattgggtgggtcttttcttttctgttggatgctactgtattggatcgaatctgtccatttagagatct

SEQ ID NO: 184 - protein, 420 aa, Arabidopsis thaliana
MANVISISHFTLLALPYLLLLLSSTAAAINVTAVLSSFPNLSSFSNLLVSSGIAAELSGRNSLTLLAVPNSQFSSASLDLTRRLPPSALADLLRFHVLLQFLSDSDLRRIPPSGSAVTTLYEASGRTFFGSGSVNVTRDPASGSVTIGSPATKNVTVLKLLETKPPNITVLTVDSLIVPTGIDITASETLTPPPTSTSLSPPPAGINLTQILINGHNFNVALSLLVASGVITEFENDERGAGITVFVPTDSAFSDLPSNVNLQSLPAEQKAFVLKFHVLHSYYTLGSLESITNPVQPTLATEEMGAGSYTLNISRVNGSIVTINSGVVLAVVTQTAFDQNPVSVFGVSKVLLPKELFPKSGQPVATAPPQEISLSPESSSEQPSRLVSPPREIVSSGAVKRPLGFLVLWCWCIAFCYVLV

SEQ ID NO: 185 - DNA, 1457 bp, Arabidopsis thaliana
agaaagacttcacattttaccattatttgctctgagctcaggtcagcttttctctcttcccctctctcctctctcttctactttatggtacagttgaattaacaatgccattgaactactacttccatgaatgtatcttctttacacttgttgtcttaagtttctatttttgtctgatccagatctagtttcttctcttgtgtcttgtgaacactttagcttcttactgtctttatgtttgttgttgttgtgtcggtttgtttttcatttttccagtaatgttgaagaaacaagttcaagatctgacttaactaacttacactagttttagtttgctagtagctatataattctttgatcctgttaaagaactcaaagatcattcgttcttgaaaacagatccggatctgagatagggttcttgataaagattcgatatttgaatcctgatttggtttcttgtaatgcagtaggagagttcaagaaacaatggcaaagatgcaattatcaatctttatcgctgtcgttgcgcttatcgtctgctctgcatctgctaaaaccgcaagccctccagctccagtgctgccaccgacaccagctccagcaccagccccggaaaatgtgaatctcaccgagcttttaagtgtagctggtccgttccacacattcctcgactaccttctctcgactggagtcattgagactttccaaaaccaagctaacaacactgaggaaggcatcacaatctttgtccctaaagatgatgctttcaaagctcagaagaatcctcctttgtcaaatctcacaaaggatcagcttaagcagcttgttctcttccatgctctgcctcattactattcgctttcggaattcaagaacttgagccaatctggtccagtgagcacctttgctggtggtcaatactccttgaaattcactgatgtttctggcacggttaggattgattctttatggaccaggactaaagtcagcagcagtgttttctccactgaccctgttgcggtttaccaagtgaaccgcgtgcttctacccgaagcaatctttggtactgatgtccctccaatgcctgctccagctcctgctcctatcgttagtgctccttcggattctccttcagttgctgattctgaaggagcttcttcaccaaagtcctcacacaagaactccggacaaaagctgctacttgcaccaatctccatggttatttccggtttggtggcattgttcttgtgatcagatggttttgcagattgagttatgtttttaagttacaatgtgaaagattgtattacatcatttgaattgtctttttgatttttgaaacccattttttattatacatttttatcattattattgtttgtcattacgattgttgtgaattgaaattgttcctccattttgcttttctttagttaattttgcttcatttgcaa

SEQ ID NO: 186 - protein, 278 aa, Arabidopsis thaliana
MGLKASLSLLSLTILLVFSKVVTANNITLAFQKYSKFSTMRDLFIKTKLIAAIDKYQTITVLAVSNDAISSITNRSEVELRNILMTHVILDYYDELKLQGMREKSIMLTTLYQTTGLGEQMNGFLNVSKSKGRVYFGSEVKNSPLNAEYVSTVYHNPYNLSIIQITMPIVAPGLSLAIFPPPPPYVHVAPYPTPMDASVVPAPGPAADDNSPDSAVPKTPPAPATDTPEADSPAPAPSADNEKIEAADKAKPSSSASKAGWSFDVILLLAFLASFAGF

SEQ ID NO: 187 - DNA, 2116 bp, Arabidopsis thaliana
aaagaaagtaaactctttcaccaaaaaaaataaagaaaatttattgttccatctttctgataatcggatcttacagagagagagctccatggatcgccgcatctatggtggctccgccgtcattcatctctttctcttcttctccgtcctaatcttctccgccgcatctgcattatccaagaaccagtctccttcttccgggtcgggtcagatcaactccaactctgtcctcgtagctcttcttgactctcgttacactgagctagctgagctcgtcgagaaagctcttctccttcagacacttgaagacgctgttggtcgtcacaatattaccatttttgctcctcgcaatgaagctcttgagcgtgaccttgaccctgagttcaagcggttcttgctcgagccaggtaatctcaaatctctgcaaacactcctcatgttccacattatacccaatcgggtcgggtcgaaccaatggccttcagaagaatcgggtcgggtcaagcaccacacgctagggaacgatcaggtccgtttgagcaacggacaaggaaaaaagatggttgatttagctgagattatccgacccgatgatttgacccgacccgacggattgatccacgggattgaacggcttctcattcctcgctctgttcaagaagatttcaatcgccgtcgtagccttcaatcaatctccgccgtcttacctgaaggagctcctgaagttgacccgagaaccaaccgtctcaagaaacccgcagctccagtacccgccggatctccaccagctcttccgatccaatccgctatggcccctggtccgtcgctagctccggcaccagctccgggacctggaggcaagcagcaccacttcgacggtgaggctcaagtcaaagatttcatccatacactgttacattacggcggttacaacgagatggcagatattctcgtgaatctgacgtcactcgcgacagagatgggacggttggtgtcagaaggctatgtgttaacggttttggctcctaacgatgaagcaatggcgaaattgaccacggatcagctgagtgagccaggagcaccggagcagatcgtatactaccatataatccctgagtatcaaacggaggagagtatgtacaattctgttaggagatttgggaaggtgaagttcgatacgttgcgttttcctcataaggttgcggctaaggaagctgatggttccgttaagtttggtgacggtgagaagtcggcgtatttgtttgatcctgatatctatacggacggtcggatttcggttcaggggattgacggtgttttgtttccacaagaggaggaggttgttgaatcggttaagaaaccggttaagaaaattgttcagccgagaagagggaaattgttggaagtagcctgtagtatgcttggtgcttttggcaaggacacttatctcagcaaatgccggtgaattcgcaaacccgccaaagaattgatgtaaacacattcaaaaagctgattgaaggtttggcctttggtgaatagaaaaggaagagagaggacaacaacaacaacgttttaaaaaaccaatcttccatggaattagaaggattggtttgttgagttctttttttctttaaatatatatttttggggggggggggggggggtgtttggtcttcatggattatgaatactgtaattagatatatcaatcattttttaattaatttggtggtgtatgagaatgagagtacactaaataaaaagagagaacaaagtttttttcttccatggtaaggatttgttgttttggagtctttggcttttactatagggaaagtataattccactttgtgtatggtaagagcaagggaataattaaattacatccatcgtcacctttttcttagatgtctctgactgtagtattttgagagaatgtaatatttataatgtgatatattttggtagaacaaattatattcacgtggacgtggacatgggaaatgagttggttcaggctgtgtttgttgattattggaggacaaactcaaaacttagctgtctttgtgagaaatctcaagtcttaatactgaagttgtctgaattttgtttttc

SEQ ID NO: 188 - protein, 247 aa, Arabidopsis thaliana
MATTPLLLLLLTAVFLSTEITAQRAAPAPGPAGPINITAILEKGGQFVTLIRLLNTTQIGNQINIQINSSSEGMTVLAPTDNAFQNLKPGTLNKLSPDDQVKLILYHVSPKFYTLEDLLSVSNPVRTQASGRDVGGVYGLNFTGQGNQVNVSTGVVETRLSTSLRQERPLAVYVVDMVLLPEEMFGERKISPMAPPPKSKSPDVSDDSESSKKAAAPSESEKSGSGEMNTGLGLGLGLVVLCLKFLL

SEQ ID NO: 189 - DNA, 1494 bp, Arabidopsis thaliana
ataagactcctctccaaatgctaccacacaattcctctatcaaagccgcccaatcctccacccaaaaatggcttatctccggcgagcagccaccgcattggttctcattttccagctccatctctttctctctctctcaaatgcacataacataacccgaatcttggccaaagaccctgatttctccactttcaaccactatctctcagcgactcatctcgccgacgagatcaaccgccggcaaacaatcaccgtcttggccgtcgataactcagcaatgtcctccatcctctctaacggatactcactctaccaaatccgcaacattctctctctccacgtcctggtcgattacttcggcaccaagaaacttcaccagatcaccgacggctccacctccactgcctccatgtttcaatccaccggatccgccaccggaacttctggatacatcaacatcaccgatataaaaggcggtaaagtcgcttttggtgtccaagacgacgatagcaagctcacagctcactacgtcaaatccgtctttgaaaagccttacaacatctctgttcttcacatcagccaagtcttaacctcgccggaagcagaagctcccacggcgagtcccagcgacctcatcctcaccacaatcctcgaaaaacaagggtgcaaagctttctccgacatcttgaagtcaaccggcgccgacaaaacgttccaagataccgtagacggaggcttaacggtgttctgtccctccgacagcgctgtcggtaagttcatgccgaaattcaaatccctttctccggcgaacaagactgcgttagtgctttaccacggcatgccggtttaccagtcgttacaaatgcttagatcaggtaacggcgccgttaacacgttagcgacggaaggtaacaacaagtttgatttcaccgttcaaaatgacggagaagacgtgacgctggagacggacgttgtgacggcgaaggtaatggggacgttaaaggatcaagagccattgatagtttacaagatcgataaagtgttgttgcctagagaaatctacaaggccgttaagacgtccgctccagctcctaagtcgagtaagaaaaagcctaagaacgcggaggctgacgccgacggacctagcgccgatgctccgtcagatgatgatgttgaggtggctgacgataaaaacggcgccgtatcagcgatgattactcgaacaagtaatgtcgtaacggccattgtcgggctctgtttcggagtttggcttatgtgaagtgacgtggcatttacctcgctttgggaatcttgttttcctttttctttgtgatctgtcggtttaatttattttacatattcttttttttgttcacgttgatacttggtgtggagatttggaataattaattgttccacttgtgttggatctgatatgttttattctaaaaaaatgtgatgatcattcaaaagagtgattggtacgttggaatc

SEQ ID NO: 190 - protein, 462 aa, Arabidopsis thaliana
MDRCIYGCSVITIFFSFFFLLNASALESGHHNITGSGQINSNSVLVALLDSRYTELAELVEKALLLQTLEDAVGRHNITIFAPRNEALERDLDPDFKRFLLQPGNLKSLQTLLLSHIIPKRVGSNQWPEENSGRVKHVTLGHDQVLHLSKLKGTNGKRLVNSAVITRPDDLTRPDGLIHGIERLLIPRSVQEDFNRRRNLRSISAVLPEGAPEIDPRTNRLKKSATAVSVPAGSPPVLPIESAMAPGPSLAPAPAPGPGGAHKHFNGDAQVKDFIHTLLHYGGYNEMADILVNLTSLATEMGRLVSEGYVLTVLAPNDEAMGKLTTDQLSEPGAPEQIMYYHIIPEYQTEESMYNSVRRFGKVKYETLRFPHKVGAKEADGSVKFGSGDRSAYLFDPDIYTDGRISVQGIDGVLFPEEKEEETVKKPTGPVKKVVQPRRGKLLEVACSMLGAIGKDSYLSRC

SEQ ID NO: 191 - DNA, 1031 bp, Arabidopsis thaliana
cacgacacgagatgggtctcaaagcctccctttctctcctctccctcaccatcttactcgtcttctctaaggtcgttacggcgaataacatcacgctggcctttcagaaatactccaaattcagcaccatgagggacctcttcatcaagaccaagctcattgcagccatcgacaaataccagacgataaccgtgcttgctgttagcaatgacgctatcagctccatcactaacagatccgaagttgagctcaggaacatcctcatgactcatgttattcttgactactacgatgagcttaagcttcaggggatgagggagaagagtataatgcttactaccttataccaaaccaccgggttgggtgaacagatgaatggtttcttgaacgtttccaaatcaaaaggaagagtttactttggatcggaagtgaagaactctcctttaaacgctgagtatgtctcgacggtgtaccacaatccatataacctctctatcatccagattaccatgccaatagtggctcctggactcagccttgcaattttcccacctccaccaccatacgttcatgtagctccatatccaactcccatggatgcttcagtggttccagctccaggaccagctgctgatgacaattccccagattctgctgtcccaaaaactccacctgcacctgcaacagacacaccagaggctgattctccagctcctgctccaagcgccgataatgagaagattgaagctgctgataaggctaaaccatcttcttctgcttctaaggctggttggagctttgatgttattctcttgttagcatttttggctagctttgctgggttctaagattcgggtgatgtgggttaaagacaataatggtaggtgagattcaaaacaatttttctgtagcttttagccaagaagagagacacggccattggaagtgaaagaaacctaaatgtaatgagctttctactcatcatgcattgtatttatcagccattttgaatgcaaatgtgatgtttgtcc

SEQ ID NO: 192 - protein, 246 aa, Arabidopsis thaliana
MATSRTFIFSNLFIFFLVIATTYGQAPAPGPSGPTNITAILEKAGQFTLFIRLLKSTQASDQINTQLNSSSSNGLTVFAPTDNAFNSLKSGTLNSLSDQQKVQLVQFHVLPTLITMPQFQTVSNPLRTQAGDGQNGKFPLNITSSGNQVNITTGVVSATVANSVYSDKQLAVYQVDQVLLPLAMFGSSVAPAPAPEKGGSVSKGSASGGDDGGDSTDSSDAERTGFGFGIRITTVAAIAASSSLWI

SEQ ID NO: 193 - DNA, 856 bp, Arabidopsis thaliana
atcgtcaccggaagattaagcaggccaattaaaatggaaggcttaacattgatagtagtgatgatgtcaagctttatgttgggagggcaaggtcagcagataagcacgccatgcacctcctccatgatctctaccttcactccatgtctcaacttcatcaccggaagcagcggcggttccgtcactcccaccgccggctgctgcgactccttgaagacgttgaccaacactggcatgggctgtgcttgcctcatcctcactgctaacgtcccgctgcctactggcttcatcaatcggactctggcgcttgctctacctcgagcctgcaaaatgggcggtgtacctattcaatgtcaagctgcggggactcctctaccagctccaggtcaggttccatttttgattgctccaccacctcaggtgtctgcttttagcccgggagcgtccaaggcggcggggacaacaccaacacaggcacctgcaccggatactcccgcggatggaccaacgggacccacaactaaatcaggaattcgacccgtagatcagcccatgcaacccaccggcctcgctcaatcttctacttctccatttctcccgttgcttttcatatctcttatcctgttgaacttataagcccaatcgacgtgtaaagtctttaacctgttatgcatgtgttgtcagatattttcattacgagttcatttttacacatgatttcagcaaaaaaaatactatttcaatactctgataaattatttcaaaaaatgcctgtcatgcatgtatttttcttcttcttttttttggtttgccgcgatatattggaaatttaaaatgtctaaaatgtcgttagctc

SEQ ID NO: 194 - protein, 458 aa, Arabidopsis thaliana
MDRRIYGGSAVIHLFLFFSVLIFSAASALSKNQSPSSGSGQINSNSVLVALLDSRYTELAELVEKALLLQTLEDAVGRHNITIFAPRNEALERDLDPEFKRFLLEPGNLKSLQTLLMFHIIPNRVGSNQWPSEESGRVKHHTLGNDQVRLSNGQGKKMVDLAEIIRPDDLTRPDGLIHGIERLLIPRSVQEDFNRRRSLQSISAVLPEGAPEVDPRTNRLKKPAAPVPAGSPPALPIQSAMAPGPSLAPAPAPGPGGKQHHFDGEAQVKDFIHTLLHYGGYNEMADILVNLTSLATEMGRLVSEGYVLTVLAPNDEAMAKLTTDQLSEPGAPEQIVYYHIIPEYQTEESMYNSVRRFGKVKFDTLRFPHKVAAKEADGSVKFGDGEKSAYLFDPDIYTDGRISVQGIDGVLFPQEEEVVESVKKPVKKIVQPRRGKLLEVACSMLGAFGKDTYLSKCR

SEQ ID NO: 195 - DNA, 1435 bp, Arabidopsis thaliana
ccggttcaatacttcaattcagattttttaatcccggtttactcgccgtccctatgaatcacagaggaatcgaaagaacctttacgaggaagctttgactcgaaatctctctgaagaagaagaggagagacgaaactgttggcttagtttccgacgccgggaacgtcggaactccggtgaacagagaatggggctgcatttggctgctctgtttttcatcatttcaccactcttcgttttctcctctcaagtccagcagcagatcggttctaatcagaacttgatcaatgatctggactcagctaagctcagaatatctcaattggaagctgttcttgaggcgacaatacagaagttggatggtaagaccctttacttgaaagagcgtgagaagttgatccaagttgctgaaactcagatccttgatttgcagtctgcttcatacattgacaagagcggcttacctttggttcaaaagaggataagcgagttagaagaagaggtgaaacttctatgggctgccttgagaacaaccaacttcgagctacacgttttagaggataaagcaagagaagctaagaataaacttaaagctaaggctttggaagttgaacagatgacagaagttgttacggagcagtggattcaggttcaacatcttgagcagatgagagaattcaataaccgaaggcatcacacacctagcagatgcccgttcgtgaagctcatgagcgatatccaaagaaaacatctgcccaaagttgatgaagcatttgacattcactggaagggaaagaaggttctctctgtgcaaccgtatctcacaaaagccctgtcacagttaaaaagcctctgggcagctgttaccaaatatcaccaccagttgcaaggcttcatcgagcatgagatggaaagaaccgagatcacagcggctctcgcaaacagagaagtggtgtttttcatggcatctgcactaattaccttcccagtgtttggagcatggatgttactctcttcctagtttggtttctggatgacatgttcaaccgatgcatcagcaatgttcagattggttttgcttctcattgctcaagaaattgtctagttttaagctttgagatccgtaggataatcctagtaggatcaattacatccgtgaacaaaccaaaatccggttactctgtggtttaaagtttaaaccagttattatggggcaaggtgcacagttgtatccaagttcaattgttggaaattgaatttgttattgaaaaaagagacaaaaccaaagacatgcagacaaaagtcaagtccttgttcgttgttttaccgttagatgtttgtcgtaagtaggagtagcctttgtatggtttaacgtgagatgattttactacatgtagtgtagtgaaagtttatatatacaagaccacattattgg

SEQ ID NO: 196 - protein, 278 aa, Arabidopsis thaliana; identical to SEQ ID NO: 186

SEQ ID NO: 197 - DNA, 1035 bp, Arabidopsis thaliana
gatatatctctagtctagacattatttgtctacaaacgttttgtattgacttggccatctcattccaacaagatacaactcatcactccaaacattcaacttccatataaaccattcccttccgatctcactttccaaatcactcttcacactttaactaagcaaaccaataatggctaccactcgtctaactctagctcctctcctcctcatcgcagccgtactactcgcaaccaaggcaacggctcagccggcagcccccgctccagagcctgctggtcccatcaacctcactgcgatcctcgaaaaaggtggtcaattcactactttcatccatcttctaaacatcactcaagtcggtagtcaagtgaacattcaagtcaatagttcatccgaaggtatgacggtgttcgcaccaacagacaatgcttttcaaaaccttaaacccggaaccctaaaccagttaagccctgacgatcaagttaaactcattctctaccacgttagccccaaatattacagtatggatgatctcctctccgtgagtaacccggttaggactcaagcttctggccgagacaacggtgtttacgggcttaacttcaccggccaaacaaaccaaatcaatgtctctactggttatgtggagacacgtattagcaattcgttgaggcaacaacgtcctctcgcagtttatgttgtcgacatggttttgttgcccggtgagatgttcggagagcacaagctttcgccgattgctcctgcccctaaatctaaatccggtggggttaccgatgactccggctccactaagaaggcagcgtcaccgtcggataagtcaggctccggtgagaagaaagtcggactagggtttggtcttggacttattgtcttatgtttgaaatttctcttttgaaaatttaatagcaaagatttgttttgctttctattgattttatcctgcgatgtgaggtataaatatgaaatttgttgattaagttccgtgaaataaaatgtgagatttttaataacata

SEQ ID NO: 198 - protein, 403 aa, Arabidopsis thaliana
MAYLRRAATALVLIFQLHLFLSLSNAHNITRILAKDPDFSTFNHYLSATHLADEINRRQTITVLAVDNSAMSSILSNGYSLYQIRNILSLHVLVDYFGTKKLHQITDGSTSTASMFQSTGSATGTSGYINITDIKGGKVAFGVQDDDSKLTAHYVKSVFEKPYNISVLHISQVLTSPEAEAPTASPSDLILTTILEKQGCKAFSDILKSTGADKTFQDTVDGGLTVFCPSDSAVGKFMPKFKSLSPANKTALVLYHGMPVYQSLQMLRSGNGAVNTLATEGNNKFDFTVQNDGEDVTLETDVVTAKVMGTLKDQEPLIVYKIDKVLLPREIYKAVKTSAPAPKSSKKKPKNAEADADGPSADAPSDDDVEVADDKNGAVSAMITRTSNVVTAIVGLCFGVWLM

SEQ ID NO: 199 - DNA, 1880 bp, Arabidopsis thaliana
gtcaagtaaaaatatctaaatcctttttatctgagtgccttttacaaaattttggatgattatctaatgagcatccataaataagctcaaattttagttagctacttgaccatggttaactctaacaaggatgataaattgataatgatataacggttcggttcggttgcttttggaagaggacgaaccataaagaaagaagctcaaagcccacccattttcgtgattacaggctttttagcaaaaggaagcagcacgtgttctcaaattaaccatagttaactcttcaatataaccatggttaacatttaacctcttcttcttcttattaacttcatcactctctttgtcttctcactttctcttctccacagttcaactcaaccttccaaattccaatggcgacatcacgagctttcactctcttcgctttcacattatctctcctcaccgtagcttctaccgtctccggccataacattactcaaatcctctctgatacgccggaatattcctcattcaacaactacctttctcaaacaaaactcgccgacgaaatcaacagccgcactacaatcaccgtccttgttctcaacaatggcgcaatgtcttccctcgccggaaaacacccactctccgtcgtcaaaaatgctctcagcctcctcgtcctcctcgactactacgatcctttaaaactccatcagctctctaaaggcacaactctcaccaccacgctttaccaaaccaccggacacgctctcgggaacctaggattcgttaacgtcaccgatctcaaaggaggcaaagtcggctttggctccgccgctcctggctccaagctcgattcctcttacaccaaatccgttaaacaaatcccttacaacatctccgttctcgaaatcaacgctccgatcatcgctcccggaatcttaaccgcacctgctccttcttccgccggagttagcaacatcaccggacttctcgagaaagccggttgcaaaaccttcgcgaatttgctcgtatcgagcggtgttattaaaacattcgaatccaccgttgaaaaaggcttgacggtttttgcaccgtccgatgaagcttttaaagctagaggtgtaccagatctgacgaatctcacacaagctgaggtggtctcgctcctagagtatcacgccctcgctgaatacaaacccaaaggatcgttaaagactaacaaagacgctatctccactttagccactaacggcgccggtaaatacgatttaacgacgtcaacttccggtgacgaggttattctccataccggcgttggtccgtcgagactcgccgacacggtggtcgatgagacacctgttgttatattcactgtggataatgtgctccttcccgctgagcttttcggaaaatcttcatcgccggcgccggcaccggagccagtgagtgcaccgacaccgaccccggctaagtcaccgtctcctgtggaagcaccttctccaaccgcagcttctccgccagcaccaccggtggatgaatcttcaccggaaggagctccgtcagactcgccgacaagttcagagaacagtaatgcgaaaaacgcggcgtttcacgttaacgctcctgcgttgttcaccgcattggtcactattgccgccacatctctcttgttataaacaaaaccttaattacgaagactgccattgtcttccttcgacgagtttttatttctttgtgatgctgtttgttaaaaactgggaattagagtgttacggtttacgtttaatcttattagttaatttagaattggatgattgttattgttttgttttggtgtgttagtttgtagtagtgtcgaaatattgagatcttctaattgactagtttcc

SEQ ID NO: 200 - protein, 197 aa, Arabidopsis thaliana
MEGLTLIVVMMSSFMLGGQGQQISTPCTSSMISTFTPCLNFITGSSGGSVTPTAGCLKTLTNTGMGCACLILTANVPLPTGFINRTLALALPRACKMGGVPIQCQAAGTPLPAPGQVPFLIAPPPQVSAFSPGASKAAGTTPTQAPAPDTPADGPTGPTTKSGIRPVDQPMQPTGLAQSSTSPFLPLLFISLILLNL

SEQ ID NO: 201 - DNA, 768 bp, Arabidopsis thaliana
atgtcttcttcacttacaatcttcttcttcttttttgcttccacattcctctacacttcatcaaattcattcaacatcactaacatcttaaacgagcacgatgatttctcaaatttcaaccagcttctctccgaaactcagctcgcttctaccatcaacaaacgtcaaaccataaccgtccttgtggtttccaacggtgcactctcctctctctctggccaaccaacctccgtcatcaagaaaatccttagccttcacattgttttagattactacgaccagaagaaactcaagaatctgagcaagaaaacagtactcctcaccactcttttccaatctagcggtctagccagaggccaacaagggttcttgaacgcaaccgttatgaaaaacggagacgtggcgtttggttctgcggttcctgggtctagccttgatgctcagcttcaagacactgtagcagcactaccgtttaacatctctgtgcttcatattagtagtgctataatgattgatgttaaaggtgataatgcacctactgcttctcctttgtcaccggtatcatctccaccacgccctgcagaatcacctaatgatgatggtcaagattttgacgagccaccatcctctgctcctggtgctgctgctgatgaaccttccgaaaacgccggctcagctaatggagtttcaagaaacgattctcagcccgctttcgcgtttacgctgttgatgtcattcatttggtggttcatggctcgacttcgatga

SEQ ID NO: 202 - protein, 45 aa, Arabidopsis thaliana
FPTPGTSELRTENGAAFGCSVFHHFTTLRFLLSSPAADRFSELDQ

SEQ ID NO: 203 - DNA, 1419 bp, Arabidopsis thaliana
atggcgaacgtaatctcaatttcccattttacccttctcgcattaccttatttacttctcctcctatcttccaccgccgccgcaattaacgtcaccgccgtcctctcctctttccctaatctctcatctttctcaaacctcctcgtctcttccggcatcgctgccgaactctccggtagaaactcattaaccctcctcgccgttcccaattctcaattctcctccgcctccttggacctcacgcgccgcctacctccttccgccctagcagatctcctccgcttccatgtcctcctccagttcctttcagattccgatctccgacgtattccaccgtcaggctccgccgtcactactctctacgaagcttccggtcgtacattctttggatctggatccgttaacgtaacccgtgacccggcttcaggatccgtcacgatcggatctccagccaccaaaaacgtcactgtgttaaagcttctcgagaccaaacctcccaacataaccgtcctcaccgtggactccctcatcgtccccaccggaatcgatatcaccgcatcggagactctcactccaccgccgacgtcaacatctctctcccctccaccggcgggaatcaatctcactcagatactaatcaacggacacaacttcaacgtcgctctatccctcctcgtcgcttccggtgtcataacagaattcgaaaacgacgaacgtggcgccggcatcacagtcttcgtccccaccgactccgccttctccgatctcccttccaacgttaacctccagtcattaccggcggagcaaaaagcattcgtgttaaaattccacgtgctacattcatactacactctcggttcactagaatcaataaccaacccggttcaaccgacattagccactgaagaaatgggagccggttcatacactctcaacatctcccgggttaacgggtcaatcgtaacgatcaattcgggtgtggttttagctgttgtgactcaaacggcttttgatcaaaacccggtttctgttttcggagtatccaaagttcttttgcctaaagaactatttccaaaatcgggtcaacccgttgccacagctcctccacaggagatttctttgtcgccggagagttctagtgaacagccgtcacgactagtatcaccaccgcgtgagatagtttcttccggcgcggttaaaagaccacttggtttcttggtcttgtggtgttggtgtatagcattttgttatgttttggtatgatttttttttctttctttcttttatcacataatgttttgccttcgattagggctttatttatttttactggattttttttttcacaagggtttatatttattcacgataatgttattgtatttgagtcgaggaaaaaacaaattcactttcccatgt

SEQ ID NO: 204 - protein, 422 aa, Arabidopsis thaliana
MATSRAFTLFAFTLSLLTVASTVSGHNITQILSDTPEYSSFNNYLSQTKLADEINSRTTITVLVLNNGAMSSLAGKHPLSVVKNALSLLVLLDYYDPLKLHQLSKGTTLTTTLYQTTGHALGNLGFVNVTDLKGGKVGFGSAAPGSKLDSSYTKSVKQIPYNISVLEINAPIIAPGILTAPAPSSAGVSNITGLLEKAGCKTFANLLVSSGVIKTFESTVEKGLTVFAPSDEAFKARGVPDLTNLTQAEVVSLLEYHALAEYKPKGSLKTNKDAISTLATNGAGKYDLTTSTSGDEVILHTGVGPSRLADTVVDETPVVIFTVDNVLLPAELFGKSSSPAPAPEPVSAPTPTPAKSPSPVEAPSPTAASPPAPPVDESSPEGAPSDSPTSSENSNAKNAAFHVNAPALFTALVTIAATSLLL

SEQ ID NO: 205 - DNA, 1285 bp, Arabidopsis thaliana
tttatggttaaacaaagcaaaaatgatcaaataaaaacaagattatgatgttgttgttgtaaaacggcatagtcaagtcacaagcgcaccaccagacggtgccgcaacaacaacaacaacaacacctacaccgcataagttacattacaacacaccctgtctttaaaaactctttcctttttaataataaatctttctttaaataccatctctcttcttcctcctctgcttctcttcatcttctaagaaagaaacaaagaaagacttcacattttaccattatttgctctgagctcagtaggagagttcaagaaacaatggcaaagatgcaattatcaatctttatcgctgtcgttgcgcttatcgtctgctctgcatctgctaaaaccgcaagccctccagctccagtgctgccaccgacaccagctccagcaccagccccggaaaatgtgaatctcaccgagcttttaagtgtagctggtccgttccacacattcctcgactaccttctctcgactggagtcattgagactttccaaaaccaagctaacaacactgaggaaggcatcacaatctttgtccctaaagatgatgctttcaaagctcagaagaatcctcctttgtcaaatctcacaaaggatcagcttaagcagcttgttctcttccatgctctgcctcattactattcgctttcggaattcaagaacttgagccaatctggtccagtgagcacctttgctggtggtcaatactccttgaaattcactgatgtttctggcacggttaggattgattctttatggaccaggactaaagtcagcagcagtgttttctccactgaccctgttgcggtttaccaagtgaaccgcgtgcttctacccgaagcaatctttggtactgatgtccctccaatgcctgctccagctcctgctcctatcgttagtgctccttcggattctccttcagttgctgattctgaaggagcttcttcaccaaagtcctcacacaagaactccggacaaaagctgctacttgcaccaatctccatggttatttccggtttggtggcattgttcttgtgatcagatggttttgcagattgagttatgtttttaagttacaatgtgaaagattgtattacatcatttgaattgtctttttgatttttgaaacccattttttattatacatttttatcattattattgtttgtcattacgattgttgtgaattgaaattgttcctccattttgcttttctttagttaattttgcttcatttgcaa

SEQ ID NO: 206 - protein, 255 aa, Arabidopsis thaliana
MSSSLTIFFFFFASTFLYTSSNSFNITNILNEHDDFSNFNQLLSETQLASTINKRQTITVLVVSNGALSSLSGQPTSVIKKILSLHIVLDYYDQKKLKNLSKKTVLLTTLFQSSGLARGQQGFLNATVMKNGDVAFGSAVPGSSLDAQLQDTVAALPFNISVLHISSAIMIDVKGDNAPTASPLSPVSSPPRPAESPNDDGQDFDEPPSSAPGAAADEPSENAGSANGVSRNDSQPAFAFTLLMSFIWWFMARLR

SEQ ID NO: 207 - DNA, 976 bp, Arabidopsis thaliana
acacaaacaaaatatcaacactcttgaaaacagagccatggaacattctctcatcatcctcctcttcaccgtcctcctcctcctcaccaccactcccggaatcctatctcagccctctccagccgtcgctccggccccaccaggacccacaaacgttaccaaaatcctagagaaagctggtcaattcaccgtcttcatccgactcctcaaatccactggagtcgctaaccaactctacggccaactaaacaactccgacaatggaatcactatattcgcaccgagtgattcctcgttcaccggtctcaaagccgggaccctaaattcgttaaccgatgagcaacaagtagagcttattcagtttcatgtcataccaagttacgtctcttcctcaaacttccaaacaataagtaaccctctccggactcaggccggtgactccgccgatggacattttcctctcaacgttaccaccagtggcaataccgtaaatatcacgtccggcgtaaccaacaccaccgtctccggcaatgtctacagcgatggacagctcgctgtttatcaggtcgataaggttttgcttccacaacaagttttcgatcctcgtcctcctgctccggctccggctccgtctgtatcgaaatcaaagaagaagaaggatgacagtgatagttccagtgatgattctccggcggatgcttcgtttgctttgcgtaatgttggttctgtgtgtgatgcggtgtcgttttgcgtcatgagtgtaatgctcgcatggttttatttgtgatgaaaagctttttttttttttgtgctgataaattgttattttttattactcatgattttctgccatgtgggtgattttggggatatatttgtgtcttggttttcatacgattttgtgttaatcaatccatttgttttttatattttcgtttatttttattaatacaaatcatattttccgttttcgtgc

SEQ ID NO: 208 - protein, 254 aa, Arabidopsis thaliana; identical to SEQ ID NO: 178

SEQ ID NO: 209 - DNA, 1031 bp, Arabidopsis thaliana; identical to SEQ ID NO: 191

SEQ ID NO: 210 - protein, 249 aa, Arabidopsis thaliana
MEHSLIILLFTVLLLLTTTPGILSQPSPAVAPAPPGPTNVTKILEKAGQFTVFIRLLKSTGVANQLYGQLNNSDNGITIFAPSDSSFTGLKAGTLNSLTDEQQVELIQFHVIPSYVSSSNFQTISNPLRTQAGDSADGHFPLNVTTSGNTVNITSGVTNTTVSGNVYSDGQLAVYQVDKVLLPQQVFDPRPPAPAPAPSVSKSKKKKDDSDSSSDDSPADASFALRNVGSVCDAVSFCVMSVMLAWFYL

SEQ ID NO: 211 - DNA, 799 bp, Arabidopsis thaliana
atgtcctcgtcactattctcttatgttgtcctcttaatcttccttttcaccatcccatacattcaaagccagcccactgctccagctccaaccactgaaaaaagtcccatcaatctcacagcgattcttgaagctggtcaccaatttaccacattaatacaactcctcaacacaactcaagtcgggtttcaggtaagtgtacaactcaatagctctgaccaagggatgactatatttgccccaacagataacgcattcaacaagcttaaacccggaaccctaaacagtctgacatatcaacaacaaatccagctcatgctctaccatatcattccaaaatactactctctaagcgatcttctcttagcaagtaatcccgttagaactcaggctacgggacaagacggaggtgtttttgggttaaatttcacaggacaagcacaaagcaaccaagtgaatgtttccaccggtgttgttgagactcggatcaataatgcattaaggcaacagtttcctctagcagtttacgtggtggacagtgtgttgttgccggaggagttattcggaacaaagaccactcccaccggagctcctgccccgaaatcctcaacttcatcgtctgatgccgattctccagctgctgatgatgagcacaaatctgccggatcaagcgtgaagaggacaagtctagggattgttgttagctttgcattgttttgttgctcggttatatatattgcttgaacctttaactaaaagcgagggaaacgttcccgaaaaacaaacatttatttgcatg

SEQ ID NO: 212 - protein, 247 aa, Arabidopsis thaliana
MSSSLFSYVVLLIFLFTIPYIQSQPTAPAPTTEKSPINLTAILEAGHQFTTLIQLLNTTQVGFQVSVQLNSSDQGMTIFAPTDNAFNKLKPGTLNSLTYQQQIQLMLYHIIPKYYSLSDLLLASNPVRTQATGQDGGVFGLNFTGQAQSNQVNVSTGVVETRINNALRQQFPLAVYVVDSVLLPEELFGTKTTPTGAPAPKSSTSSSDADSPAADDEHKSAGSSVKRTSLGIVVSFALFCCSVIYIA

SEQ ID NO: 213 - DNA, 1571 bp, Arabidopsis thaliana
cactttaagctcttcttcactcacactctctcaaaaatcaccaaaccaaactcttcactctctccaacaatggccaagaagatgagttctctcatcatcatcttcaacattctccttctcctcacaactcaaacccacgcgcacaacgtcacgcgcctcctagcaaaccacccatcattctcttccttcagccatttcctaacacaaacacacctcgccgacgaaatcaaccggagaagaaccataaccgtttgcgcagtagataacgccgccatgtcagcattaacctctaaaggctatacactctcaactctcaaaaacattctctccctccacgtccttttagattacttcggaaccaaaaaactccaccagatccgtgacggctctgctctcgccgctactctgtttcaagccaccggagctgctcctggaacctcaggattcgttaacataacggatctgagaggtggtaaagttgggtttggtcctgacggtggagatctgtcttctttctttgttaaatctattgaagaagttccgtataacatctccattattcagatcagtagagttttaccgtcggagactgcggcggctccgactcctgctccggcggagatgaatcttaccggaataatgtcggctcatggatgcaaagtgtttgctgagactcttctcactaaccctggagcttcaaaaacctatcaggagagtttagaaggaggcatgacagtgttctgtccaggagatgatgcaatgaaaggtttcttgcccaaatacaagaacttgacagctccaaagaaagaagcatttctcgatttcctcgctgtcccgacatattactcaatggcgatgctcaaatccaacaatggtccgatgaacacacttgcgacagatggagctaacaagtttgagcttactgtacagaacgatggagagaaggttaccctcaagacaaggatcaacactgtcaagatcgttgatactcttattgatgagcagcctttagctatatatgcgactgataaggttttgttgcctaaagagttgtttaaggcttcggctgttgaagctccggctcctgctccggcaccagaggatggtgatgttgcggattctccaaaagcggctaaagggaaagcgaaaggaaagaagaagaaggctgcaccgtcgccagataatgatccttttggtgactcggattcgcctgccgaagggcctgacggagaggccgatgatgcgacggcagatgatgctggtgcggttaggatcatcggaggagctaaggctggtttggtggtgagcttgctctgcttgtttgcttcttcttggcttctatagtttcacttcgtttcttctattcttccatgtttttttttttgtgaatcttttatttatggtttttgggggaaagtaaatgaggattatttatttccctctattgttgagttttttttatttatttaaaagttggttgtcgaattaaatagtcggtagtttatatatttgtgtgttcttgtttcacgtgtttgtttagttgatgatgtaaacaagtcctgattttggtg

SEQ ID NO: 214 - protein, 424 aa, Arabidopsis thaliana
MAKKMSSLIIIFNILLLLTTQTHAHNVTRLLANHPSFSSFSHFLTQTHLADEINRRRTITVCAVDNAAMSALTSKGYTLSTLKNILSLHVLLDYFGTKKLHQIRDGSALAATLFQATGAAPGTSGFVNITDLRGGKVGFGPDGGDLSSFFVKSIEEVPYNISIIQISRVLPSETAAAPTPAPAEMNLTGIMSAHGCKVFAETLLTNPGASKTYQESLEGGMTVFCPGDDAMKGFLPKYKNLTAPKKEAFLDFLAVPTYYSMAMLKSNNGPMNTLATDGANKFELTVQNDGEKVTLKTRINTVKIVDTLIDEQPLAIYATDKVLLPKELFKASAVEAPAPAPAPEDGDVADSPKAAKGKAKGKKKKAAPSPDNDPFGDSDSPAEGPDGEADDATADDAGAVRIIGGAKAGLVVSLLCLFASSWLL

SEQ ID NO: 215 - DNA, 1746 bp, Arabidopsis thaliana
ctctctccttcttcacaagcaaaaaaacaccaaaccatttttctttcttcattgtgccgacacttctttcccctctctctctctctctccaccgccatggattcctcctatggcgccacaaagttccttctcctcctcttcctcaccacctccattgcgaccgcattacccgataacaaaccagtaccgggtcaaataaactcaaactcagtcctcgtagctctcctggactctcactacacagagctagcagaactagtcgaaaaagctctccttctccagaccctcgaagaagcagttggtaaacacaacatcacaatcttcgcaccacgcaacgatgccttggaacgaaacttagacccactcttcaaatctttcttgctcgaaccaagaaacctcaaatctttacaatctttattaatgttccacattcttcctaaacgaatcacttctcctcaatggccttctctttctcatcaccaccgtactctctccaacgaccatctccacctcaccgtcgacgtcaacactcttaaagtagattccgctgagattatccgacccgatgacgtcattagacccgatggtatcattcacggcatcgaacgtcttctcatccctcgctctgttcaagaagattttaaccgccgtcgtagtctccgttcaatctccgccgttataccagaaggagctcctgaggttgaccctagaactcaccgtctcaagaaaccatctcccgccgttcccgccggagctcctccggttcttccaatctacgacgctatgtcaccaggtccttccctagctcctgctccagctcccggacccggtggtccacgtggccatttcaacggcgatgctcaagttaaagatttcatccacactctcttgcattacggtggctacaacgagatggctgatatactcgtcaacttaacctctttagccactgagatgggtcgactcgtgtcagaaggctacgttttaaccgttcttgctcctaacgacgaagccatggctaagctcacaacggaccagcttagcgagccaggtgctcctgaacaaattatgtattaccacatcataccggagtatcaaacagaggagagtatgtacaacgctgttcggagattcggaaaagtgaagtatgattcattgagattcccacataaagtgttggctcaagaagctgatggatctgtcaaattcggacacggtgatggttcagcttacttgtttgatcctgatatctacacggacggtcggatttcagttcagggtattgatggagtcttgttcccgaaggaggaaacgccggcgacggagattaaaccagctgctccggtcgttaagaaagtttctaaatcaagaagaggtaaattgatggaggtagcttgtagaatgatggggtcacggtttattccgtgtcagtgatttcacacgttatcaaaaaaaaattccaagcttccaaattcttaattctgtaaacatgtggaaaaaaaaaagaaagagttgaatatgtaaatgatgtgatttttgggttcgttgttatttgcatgttctatttgtaatttttttattatcataaatatatatatatatatacgtagattttgattaagtttgttatttgggggtgagtaaaaaagttctaggagtttagagaaatcaaatatgtaatacaagttatacaatctgtatggaaataataaaggaaggatccatttgtgtgcctattctattcta

SEQ ID NO: 216 - protein, 445 aa, Arabidopsis thaliana
MDSSYGATKFLLLLFLTTSIATALPDNKPVPGQINSNSVLVALLDSHYTELAELVEKALLLQTLEEAVGKHNITIFAPRNDALERNLDPLFKSFLLEPRNLKSLQSLLMFHILPKRITSPQWPSLSHHHRTLSNDHLHLTVDVNTLKVDSAEIIRPDDVIRPDGIIHGIERLLIPRSVQEDFNRRRSLRSISAVIPEGAPEVDPRTHRLKKPSPAVPAGAPPVLPIYDAMSPGPSLAPAPAPGPGGPRGHFNGDAQVKDFIHTLLHYGGYNEMADILVNLTSLATEMGRLVSEGYVLTVLAPNDEAMAKLTTDQLSEPGAPEQIMYYHIIPEYQTEESMYNAVRRFGKVKYDSLRFPHKVLAQEADGSVKFGHGDGSAYLFDPDIYTDGRISVQGIDGVLFPKEETPATEIKPAAPVVKKVSKSRRGKLMEVACRMMGSRFIPCQ

SEQ ID NO: 217 - DNA, 1190 bp, Arabidopsis thaliana
gctcctcttaaggtctgtatatatacccaacctgatcctcttattgcaaactcaggctttgaggtttgagcttttactatagaataataagggtaataaacaaagacacccaaagatgggtctcaaggtctcctcttctctcctctgtctcaccatcttactcgctgtttcatccattgtatcagcggttaacataacccgagtgctcgagaaataccctgaattcagcaccatgaccgagcttcttgccaagaccgagctcacaccaattatcaacaaacgtcagaccatcaccgtgctggcccttaacaacgatgctatcggttccatctctggtagacccgaggaagaggtcaagaacattcttatgaaccatgtggttcttgactactttgatgagcttaagctcaaggctctcaaggaaaagagcacattgctcactaccctttaccagtccaccggtttgggccaacagcaaaacggtttcctcaactgcaccaaatctaacggaaagatttactttggttctggtgtgaaaggcgctcctcaaaccgctgaatacatcacaaccgttttccgtaacccgtacaatctctctgtggtccagatcagcatgcccattgtggcacctggactcgggtctccggttaaggttcctccaccaccacccatgtcttcaccaccggccccatctcccaagaagggtgcagccactccagctccagctcctgctgatgaaggggattatgcagatgctcctcctggtttagctccagaaaccgcacctgcatctgcaccatcagaaagtgattctccagctccagctccagataagtctggcaagaagaagatggcagcagctgatgaggctgaaccaccttcttctgcttctaacaccggtttgagcttcggtgctgtccttgttctcgggtttgtggctagctttgttgggttctaagatgatttaagacagcgagtcgaggataaattaaactgataatgagactcgaacatagacagaggcaatggtgatacgaagtggatcaaagacactaacaatttctactcacattattgtacctcaatcatttatcattagacaatgaaagtgtgatgttctgtcctgtgaagcttgtattaccacattgtaactaaatgttttatcttcattcatccaatccgtaacgtaa

SEQ ID NO: 218 - protein, 280 aa, Arabidopsis thaliana
MGLKVSSSLLCLTILLAVSSIVSAVNITRVLEKYPEFSTMTELLAKTELTPIINKRQTITVLALNNDAIGSISGRPEEEVKNILMNHVVLDYFDELKLKALKEKSTLLTTLYQSTGLGQQQNGFLNCTKSNGKIYFGSGVKGAPQTAEYITTVFRNPYNLSVVQISMPIVAPGLGSPVKVPPPPPMSSPPAPSPKKGAATPAPAPADEGDYADAPPGLAPETAPASAPSESDSPAPAPDKSGKKKMAAADEAEPPSSASNTGLSFGAVLVLGFVASFVGF

SEQ ID NO: 219 - DNA, 1512 bp, Brassica napus
aaaacctcaatggcttcttcatcacgtgctctctctctcctcaccacattcactctatctctcctcgccgtcctttccaccgtctccggccacaacatcacccaaatcctctccgaatcacctgaatactcctccttcaacagctacctctcccaaacaaagctcgccgacgaaatcaacagccgcaccaccatcaccctcctcgtcctcaacaatggcgcaatgtcttccctcgccggaaaacacccactctccgtcgtcaaaaacgccctcagcctcctcgtcctcctcgattactacgaccccgtcaagctccacaagatctctcaaggcaccacactcaccaccacgctttaccaaaccaccggtaacgctcccggaaacctaggcttcgtcaacatcaccgatctcaaaggcggcaaggtcggcttcggttccgccgctcctggctccaagctcgcttcaacctacaccaagttagttaagcagatcccttacaacatctccgtcctcgaaatcgacgctccgatcatcgctcccggaatcttaaccgctccggctccctccgccgacggtctcaacaacatcaccggacttctcgagaaagccggttgcaaaaccttcgctaacttgctcgtcacgagcggtgtgctcaagacctacgtatccaccgttgaaaaagggttgactgtttttgcaccgtccgatgaagctttcaaagccgaaggcgtaccggatctaaccaagctcacgcaagctgaggtggtctcgctcctagagtatcacgccctcgctgagtacaaacccaaaggctcgttgaagactaataaagatgcaatctccacgttagctactaacggtgccggtaaatatgatttaacgacgtcaacctcgggcgatgaagttattctccacactggcattggaccgtcgagactcgctgacacggtggtggatgagacacccgtcgtgatattcacggtggataaagtcctcctccctaccgagctcttcggaaaatcaccatctccggcgccggcgccggaacctgtaagtgcaccgacaccatctccggctaagtcgccgtctccagctgaagcgccgtcaccagtcgcagcttcaccgcctgcgcctccagttgataattcgccggaaggagctccgtcagactcgccgacaagttcagaggacagcaatgctaaaaacgcggcgtttcacgtgtgcgcttctgcgtacgtcaccactgtattggtcacatttgccgctacatctctattgctataaacaaacccttggaaactttcgtaattacgtagactgccattctcttcttcttttttcattttctaattttcttctatttttgtgtgtttcttaagactgagattagagagtgaggtttaagctttaatcttctttctaattaatgtagtatgattgcttttgttttggacctcttggtgctactgttgaacttaactagtttctagtttgagcaaaaaaaaaaaaaaa

SEQ ID NO: 220 - protein, 424 aa, Brassica napus
MASSSRALSLLTTFTLSLLAVLSTVSGHNITQILSESPEYSSFNSYLSQTKLADEINSRTTITLLVLNNGAMSSLAGKHPLSVVKNALSLLVLLDYYDPVKLHKISQGTTLTTTLYQTTGNAPGNLGFVNITDLKGGKVGFGSAAPGSKLASTYTKLVKQIPYNISVLEIDAPIIAPGILTAPAPSADGLNNITGLLEKAGCKTFANLLVTSGVLKTYVSTVEKGLTVFAPSDEAFKAEGVPDLTKLTQAEVVSLLEYHALAEYKPKGSLKTNKDAISTLATNGAGKYDLTTSTSGDEVILHTGIGPSRLADTVVDETPVVIFTVDKVLLPTELFGKSPSPAPAPEPVSAPTPSPAKSPSPAEAPSPVAASPPAPPVDNSPEGAPSDSPTSSEDSNAKNAAFHVCASAYVTTVLVTFAATSLLL

SEQ ID NO: 221 - DNA, 1152 bp, Glycine max
cacgaggctcagacacacactctcactctctctccctcaccttccataatgcagctcctccggccactgctcgcggcggcgctgctcctcctcgccaccctctccgacgcgcacaacatcaccagcatcctcgcaaagcaccccgagctctccaccttcaaccactacctcaccctcacccacctcgcccccgaaatcaacggcaaaaccaccatcaccgtctgtgccgtcaacaacgccgccatgtcggaccttctctcgaagcacccctccatctacaccgtcaagaacgtcctctccctccatgtcctccttgactactttggtgccaagaagcaccactagaacaccaatggcaccaccctcgccgccacaatgtaccaagccaccggcaccgcccccggatccgctggcttcgtcaacatcaccgatctccacgacggaaaagtcgcattcacctctgaaaacaacgacggcacactctcctcaacgttcgtcaaatcggtggaagaaatcccttacaacatctccgtaatccagatcagtaaggttctcccctctgccgcagcggaagcccctgcacccgcacccacccaacaaaacctcaccaacattatgtcaaaacacggatgcaaggtcttcgccgacactctctctgctcaacccgacgctctcaacaccttcaatgacaacctcgacggtggcttaaccgtcttttgccccctcgacgacgcgtttaaagcctttctccccaaattcaaaaacctaacaaaatctggtaaggccgcgcttcttgaattccacgctgttccggtttaccagtccaaagctactctcaaatccaataacggacttcagaacactctcgccactgatggcgccaacaagtttgacttcaccgttcaaaacgacggtgaagatgttactctgaagacgaagcttacaactgccaagatcaccgacactttgattgatgaacagccgcttgcgatttttgctattaataaggtgcttcagcctaaggagttatttaagggtgaggcggaggctccggcgccggcgccggagccttctgccgccgacgctcctgcgccggcgaagaaggggaagaagaagaagaaggcggctgatgcgccggcggatgattctgat

SEQ ID NO: 222 - protein, 367 aa, Glycine max
MQLLRPLLAAALLLLATLSDAHNITSILAKHPELSTFNHYLTLTHLAPEINGKTTITVCAVNNAAMSDLLSKHPSIYTVKNVLSLHVLLDYFGAKKHHNTNGTTLAATMYQATGTAPGSAGFVNITDLHDGKVAFTSENNDGTLSSTFVKSVEEIPYNISVIQISKVLPSAAAEAPAPAPTQQNLTNIMSKHGCKVFADTLSAQPDALNTFNDNLDGGLTVFCPLDDAFKAFLPKFKNLTKSGKAALLEFHAVPVYQSKATLKSNNGLQNTLATDGANKFDFTVQNDGEDVTLKTKLTTAKITDTLIDEQPLAIFAINKVLQPKELFKGEAEAPAPAPEPSAADAPAPAKKGKKKKKAADAPADDSD

SEQ ID NO: 223 - DNA, 1046 bp, Hordeum vulgare
acagctctcccactccactgccctcactcccacgccgacactcgccataatgcgccgcctccacctcgccgccgccgtcctcgccgtcatcgtcctccccctcgccgtctccgcggccgggggcaaagcagcggcagctaaggcgcccgctgctccgccggccccgccgaacatcacggcggcgatggccaagggcgggtgcaaggcgttcgcggccctggtggcggcctcgccggacgcgcactccacgttccagtcggccggggacggcggcgtgacggcgttctgccccagcgacgacgccgtgaggtccttcatgcccaggtacaagaacctcaccgccgacggcaaggcgtcgctgctgctgttccacgccgtgcccgtgtactacgcgccgcggagcctcaagtccaacaacggcgtcatgaacacgctcgccaccgacggctcggccaacaacttcaacctcacggtgcagaacgagggcgagcaggtgaccatcaagacggacgcctccgaccacgccgcgcgggtcaggtccaccgtgtacgacaaggaccccatcgccatctacgccgtcgacacggtgctcgagccggtggagctcttcgagccggccgactccccggcgccggcgccgggttccgcccccgttgaggacgcgcccaaagccccccaaaagcaagcgcgccaccgggctgtttcggacgcgcccgggccggcccggcaggacacggggcccgccgaccataagaaaaactttagaaaaacccggcgttcgggccttattggtttggatggggcccaatcttgcacttttccgtgggcgaggggcccctttttggtttaaacaaagggttgtggtggaactcttcccgcagggggggaggtgtaatggggaatagggtgggcgtttttcctgtttgttatgttggaaagaccccctacggtcccgaatgttaagttttcgtaaaagggttttttataatgtggaagatatttgtgatacacttcggggattttttttagaggattgtggttacaca

SEQ ID NO: 224 - protein, 266 aa, Hordeum vulgare
MRRLHLAAAVLAVIVLPLAVSAAGGKAAAAKAPAAPPAPPNITAAMAKGGCKAFAALVAASPDAHSTFQSAGDGGVTAFCPSDDAVRSFMPRYKNLTADGKASLLLFHAVPVYYAPRSLKSNNGVMNTLATDGSANNFNLTVQNEGEQVTIKTDASDHAARVRSTVYDKDPIAIYAVDTVLEPVELFEPADSPAPAPGSAPVEDAPKAPQKQARHRAVSDAPGPARQDTGPADHKKNFRKTRRSGLIGLDGAQSCTFPWARGPFLV

SEQ ID NO: 225 - DNA, 1226 bp, Hordeum vulgare
  misc_feature (1128)..(1128): n is a, c, g, or t
  misc_feature (1166)..(1166): n is a, c, g, or t
  misc_feature (1186)..(1186): n is a, c, g, or t
ctcctcttctctctccccgacctctcgctctctctctctgtggatactgttgtgtcctcggcaatggcgggaagccggcagtccatcctcctggccttcgccatcggggcaatggtggcggcgctgctggcttccccggtggccgccaagagctacaacatcaccaagatcctggcggcgcacccggagttttccaagttcaacgcgatgctgagcaagacacggctcgcgtacgacatcaaccggcgccagaccatcaccgtgctggccttggacaactcggccatggcggcgttggaccactacacgctgccaaccgtccgccacatcctctccctgcacgtcctcgttgactactacggcaacaagaagctcaaaacgctctcgcgcggcgccaccgcctccgcatccatgttccagtccaccgggacggcgtcgggcatgtcgggctacgtgaacatcacgtcccacaagggcggcaaggtggagttcgtcagcgtggacgccgacgacaccgtcaagccttcccggtacgtcaagtccatcaaggagatcccctacgacatctcggtgctccagatcggctctgtcctctcctcctccgaggccgaggcgcctgtcccgccgccggcccccgtcgacctcgtcgagctcctctccaagaagcactgcaagtcgttcgccgggctcatctccggcaacgccgacgtgttccgcacgtacaacgagaccaaggacaacggcctcactatcttctgccccgtcgacgccgccgtggccgccttcatgcccaagtacaagaacctgacggccaaggccaaaacggccatcctgctctaccacggtgtgtcggactacttctcgctgcagctgctcaagtccaacaacggcatggtctccaccctcgccaccaccagtgagatcaagaaagactacagctacgacgtgcagaacgaggacgaggaggtcaccctggtgaccaaggtcgttaccttcaccatcaccgccaccgtcggcgacagcgagccgctcgccgtctacgccgtgttcaagttcttgcagccaaaggagctgttcaaggtcgtccaggcgccggcgccccgcccgtcaaagaaggggtagactcangacgacagcgatgactcttcatctgatgacgaagattnccgatgatgccacactgatnagggcgatgccgcaccatccgtataccggagatggccgac

SEQ ID NO: 226 - protein, 352 aa, Hordeum vulgare
MAGSRQSILLAFAIGAMVAALLASPVAAKSYNITKILAAHPEFSKFNAMLSKTRLAYDINRRQTITVLALDNSAMAALDHYTLPTVRHILSLHVLVDYYGNKKLKTLSRGATASASMFQSTGTASGMSGYVNITSHKGGKVEFVSVDADDTVKPSRYVKSIKEIPYDISVLQIGSVLSSSEAEAPVPPPAPVDLVELLSKKHCKSFAGLISGNADVFRTYNETKDNGLTIFCPVDAAVAAFMPKYKNLTAKAKTAILLYHGVSDYFSLQLLKSNNGMVSTLATTSEIKKDYSYDVQNEDEEVTLVTKVVTFTITATVGDSEPLAVYAVFKFLQPKELFKVVQAPAPRPSKKG

SEQ ID NO: 227 - DNA, 1696 bp, Hordeum vulgare
caccatcagtgatttttcagtggtgctgcccagctcagtgctctccaccagtccgccccgccccgacccaccccatcccgagctccaggcgccgacgcaccgaggacgaggaggacgatggaggcgcggcggcgggcggcgctggtggcgctggcggtgctggccatggcggcggcggcggcggaggggtacaacatcaccaagatcctgggcgagtacccggagtactcgcagttcaacaagctgctcacgcagacgcggctggcgcaggacatcaacaagcgccgcaccatcaccgtcctcgtcgtggccaacggcgacatgggcagcctcgccggcggcggccgcacgctgcagaccatccgccacatgctccagattcacgtcctcgtcgactactacggcggcaagaagctccaccagctcgcgcacggcgtcaccgcgtgctcctccatgttccaggagtccggcgcggcccccggcatgtctgggtacgtgaacatcacgcagcaccggggcggcaaggtgacgttcacggcggaggacgcggaggacagcgcgccgtcgtcggccttcgtcaagtccgtcaaggagatcccctacgacctggcggtgctccagatcagcaaggtgctggcctcgccggagccgaggcgcccgtggggcgccggcgccggtcaacatcaccgagctgctctccaagaagtactgcaagagcttcgcgggcctgctggcggccgacgccgaggcatacagcaccatcaacgccaccaaggacaacgggctcaccctcttctgccccgttgacgccgccgtcgcctccttcatgcccaagtacaagaacctgacggccaaggggcggacggccatcctgctgtaccacgccgtgccggactactactccctgcagctgctcacctccaacagcggcaaggtgagcacgctcgccacctccaacgtcgccaagaaggactacagcttcgacgtggagaaggacggcgagacggcggagctcgacaccaagggtgaactcagcgtcggtcacctacaccatcaaggacgacgacccgctcgccgtctacgccatctccaagttcctgcagcccaaggagctgtacaaggtcgccaaggacaaggacctcgccccagcgccggcgcccgaggggcccaagaagaagaagaccaccaagaagaagccctccgcggccgcctcgccatcggacgacgacgacgatgactccgccgcggactcgcccgacgacgactcctcgtccgacgacgccaccgcagacaaggacggcgccgcgccgtccgcggtcgccgggtgggtgaccgccgccgtggccgtggcgtcggcgctggcactggcagcttgataaggtgtgtgaactggtgtgtttttgtgctgagttctccgaaaattcgtggcccttgttattcagtgcggaaaataagaagggccgtttcattcgtatttattactgctgcatgtcctcaaggaaaaaagaagggaaaagacaggaatttccaaggttttgttgtgatgatcattttgtaatgatagtggtcaatgggactggagtgtgcgtgtttcgttgtgtttataatactactactacatatatgaaagacatcatggagttttagagtgatgtaaaaaaaaaaaaaaaaaaaaaaaaaaaaaactcagactagt

SEQ ID NO: 228 - protein, 229 aa, Hordeum vulgare
MEARRRAALVALAVLAMAAAAAEGYNITKILGEYPEYSQFNKLLTQTRLAQDINKRRTITVLVVANGDMGSLAGGGRTLQTIRHMLQIHVLVDYYGGKKLHQLAHGVTACSSMFQESGAAPGMSGYVNITQHRGGKVTFTAEDAEDSAPSSAFVKSVKEIPYDLAVLQISKVLASPEPRRPWGAGAGQHHRAALQEVLQELRGPAGGRRRGIQHHQRHQGQRAHPLLPR

SEQ ID NO: 229 - DNA, 876 bp, Medicago truncatula
atgattagaaatcaatctctcttgtccttctcacttgcactactagtttctctcttgtattcaaccaccactagtttatctcaactatcacctgctactgctcctatacaacctacactaccagctccaaccacacctgctgcagctcctaaaccattggtaccttcattaccagagtcacctagtgattccacccctgacaccgcaggcactgttgacatcgtcggaatcctgagaaaggcgaaggcatacaatgtcttcattcgactcatgaaaacaactcaattgatcaaccaactcaattcacaactactggctacaaaaacaggtggattaacaatacttgcaccagatgacagcgctttttcaggactcaaagcgggattcctaaactctctttccgatggacaaaagctcgagttgttacagttccatgttatttcagactatgtatctagctctaacttcgatactctaaccaaccctgtgagaacacttgctggagataaacccggaaaggtggaacttaatgttgtgagttacggaggaagtgtgaacatatcgacaggggaagtgaacacgacaatcaatggcattatatataccgataaacgtcttgctatttacaaagttggcaaagtgcttcttcctatggatttcttttccgttgctaaggcaccggggaaggcaccatctttggcaccagaaccttcaaccgatacagcaaaggcacctaaacccgataaagatacatcatcagattcgtcgcaggtgattaatccaactgtaaacaagtctggctctatcaagattgtgtatggaaagtggatgtcagttggacttgtattacctttcgcggcgatgattcaaatttga

SEQ ID NO: 230 - protein, 291 aa, Medicago truncatula
MIRNQSLLSFSLALLVSLLYSTTTSLSQLSPATAPIQPTLPAPTTPAAAPKPLVPSLPESPSDSTPDTAGTVDIVGILRKAKAYNVFIRLMKTTQLINQLNSQLLATKTGGLTILAPDDSAFSGLKAGFLNSLSDGQKLELLQFHVISDYVSSSNFDTLTNPVRTLAGDKPGKVELNVVSYGGSVNISTGEVNTTINGIIYTDKRLAIYKVGKVLLPMDFFSVAKAPGKAPSLAPEPSTDTAKAPKPDKDTSSDSSQVINPTVNKSGSIKIVYGKWMSVGLVLPFAAMIQI

SEQ ID NO: 231 - DNA, 951 bp, Medicago truncatula
atgaggaatatgatgcagcagtctctcatttccacctcattccttctttttgcaattactttttacacctccaccactttagcccaactctcaccaattcaatccccaacaacatcatctccatcaccacccttaccatcaacaacagcatcaacaccattaccagcaacaacagcaacagcgccatcaccaggattaagcacagttccacttgttccaacaacaccagctggtgcaccatcacccaccataacagtcccaaaaggacccaccattgacataatcaacattcttcaaaaagccaaaaggttctccgttctaatccgtcttctcaaaacaacacaattaatcaatcaactcaactcgcagctggtatcatcgccatcaggttccggtgggttaaccatttttgcaccagaagattctgcattctccaaactcaaagcagggttcctcaactccctcactgatagacaaaaagtcgaactcttacagtttcactcccttgcttcattcgtttctatttcaaacttcgataccttaaccaaccctgttcaaacacaagccggtgatgatgctaggcttcaactgaacgtcactacttatggtggcagtcaagttagtatggctaccggagcagtcaatgctaccgttaccggtactgtttataccgacagcaaacttgctatttatcaggttgataaggtacttatgcctcttgatcttgttcttccggctaaggctccagctctggctcctgcaccagctaagggtttgttgcctaaggctggaaaaacgaattcttcagttgcagatgatggtagtggtgctggtagtgatgatggtgatggcaaggatttacctgctgatatttctgctgcagggtctgtgatgtgggtgaatgctgttgttgtttttggaatgggtttggttggtggagttgttctataa

SEQ ID NO: 232 - protein, 250 aa, Medicago truncatula
MVKMNYPLFTLSLLLIVLFYPTTINSASESPAPSPSSAPTDIIRILKKAGGFTTLIRLLQTTQVATQINAQLLNSNNGLTLFAPNDNSFSTLKPGFLNSLNDQQKNELIQFHELPSFVALSNFDTLSNPVRTQAGDDPERLALNITSSGTQVNLTTGVVNATVGGSVFSDHQLAIYQVDKVLLPKDFFIPKSPPPAPAPEKSKDSKKKSAEGPASLDDNDKSSAMSLKDKNGIMLIFAVYMVIAATLFSL

SEQ ID NO: 233 - DNA, 753 bp, Medicago truncatula
atggtaaagatgaactatcctctcttcacactctcacttctcctaatagtcctcttctatcccaccaccataaattcagcatctgaatcaccagcaccatcaccatcatcagccccaacagatattatccgaatcctcaaaaaagccggtggattcaccacccttatccgcctcctccaaaccactcaagtagccacacaaatcaatgcacaactcctaaactcaaacaatggactaacactctttgcaccaaatgacaattccttttcaaccctcaaacctggttttctcaattcccttaatgatcaacaaaagaatgagcttattcaattccatgaactaccctcatttgttgcactctcaaattttgatactttaagcaacccagttagaacacaagctggtgatgatcctgagagattagcattgaatataacaagttcagggactcaagtgaatttaacaactggtgttgttaatgctactgttggtggtagtgttttttctgatcatcaacttgctatttatcaagttgataaggttcttcttcctaaggatttcttcattcccaagtctcctccaccggctccggcaccagaaaagagtaaagattccaagaaaaaatctgcagagggtcctgcatctttagatgataatgacaaatcatctgctatgagtttgaaggacaagaatggaataatgttgatatttgcagtttatatggttattgctgcaactttattttcattgtga

SEQ ID NO: 234 - protein, 46 aa, Medicago truncatula
RRQHCRPRHNITAILHQRKQFPRFNTTTTTLGIKLNQRSSNKTIHL

SEQ ID NO: 235 - DNA, 651 bp, Medicago truncatula
atgttccaaatagttctcatcgttaccatcatcttatcatcatcatcattatcatccctcaacttatcttccccaataacatcatcatcatcatcaccatcatcatcattcctcaacctaaccaaaattctttactcatctcacactttctttaaagcagcctcggagtttcattctctcggcattgacagtgagattgacactcgttattcaaccacggtatttgttccggatgacaaagcattcgcaaatgctactgtttccaaaagatatgagtcgcttagcgacgataacaagtatttcgttctcaaatgtcatatgttgaaagaatatttgcctcctgctgtccttcgcaaaattgccaatgatatgcatttgcaagatacggtggcaaccgaaatcatgggccaggctacatataggataaacatcactgtgatggttaacggctctgtggccgtcagcaacaacattgtccgagctcttgttactcggactttgtatgatcgctctccaatcgctgtctacgctgtctccaaggtgttgatgccgaaagagcttcccgcgctcatcacctctgatgtcaccgcccctaatgtttactgctttaaattttctgttgttttaattcttcttgtactttggatttag

SEQ ID NO: 236 - protein, 95 aa, Medicago truncatula
MVAVKIMGQDKYMINITAMVNGSVAISNNIVRALVTWTLYDRSLVVVYAFSKVLMPKELSHISNHAPITSDVTAPAVYCFKISVVLLLLLLVLWI

SEQ ID NO: 237 - DNA, 888 bp, Medicago truncatula
atgatgaaactacgatctcttttctttgcctcaattctacagctactaattctcaccctctactattccactaccacctcagcacaaatctcaccagttcaatctccacaagcctctacaccagcaccaggtttcaacacagtcccccttgtaccagtaaccccgagtggggcccccacccctaatattctcccaaaatcaccatccatagacattatccaaatcctcaaaaaagcaaaaagattctcagttctcattcgtcttctcaaaacaactcagttaataaaccaactcaactcacaactagttacatcatcatcatcagattctagcagtggtggcttaaccctttttgcaccagaagacaatgccttttcaaaactcaaaccaggtttccttaattccctcagtgacagacacaaagtagaactgttacaattccacacactttcctcattcatctcaatctcgaacttcgacaccttaaccaacccggttcaaacacaagccggtgatgacgccaaaaggctacaacttaatgtaaccacttctggcggtagccatgtcagcatgacaactggcacggttaatgcaaccgttactggaacagtttacacagacaacaaactagctatatatcaggttgacaaggttcttgttcctcttgatcttgtgcttcctgctaaagctcctgcacctgcaccggtttctaaaggagattcagctaagcctgatgatagaagcaagtcatcatcagcaaaggatgacgatgatgagaataatgacttgcctgcagaagcttctggtgctggttattcaaatgtggatggaatgtggctggctcttgtttttgggatggttttgcttgctggtgaagcaatgctatga

SEQ ID NO: 238 - protein, 262 aa, Medicago truncatula
MKVSMIFLVSTLLLLSSSAFAKTVSPPSPPAESPTPAPAPAPTPDFVNLTELLTVAGPFHTFLQYLQSTKVLDTFQNQANNTEEGITIFVPKDSSFASLKKPSLSKLKDDEIKQVILFHALPHFYSLADFKNLSQTASTPTFAGGDYTLNFTDNSGTVKINSGWSITKVTSAVHATDPVAIYQVDKVLLPEAIFGTDIPPVLAPAPTPEIAPAADSPTEQSADSKSSSPSSSPDRSSSYKIVSYGIWGNLVLATFGLVVVIL

SEQ ID NO: 239 - DNA, 2640 bp, Medicago truncatula
atgcaaatgctatgtaccaaaactttttcactatcccgcttccaagaaacttgtttacgtgttctttcattctgcaactcaaactctctcaaagaaggaatatgcattcatagccccataatcaaacttggtcttcaacatgacttgtatttaaccaacaatttactctctttatatgctaaaacctttggagttcatcgagcacgccacttgttcgatgaaatgcctaacagagacgtcgtatcatggacaacgattctgtcttcacacaccaagactaagcatcattctgatgccctgcagttgtttgatatgatgataggttctggtgagtatccgaatgagtttacactgtctagtgcgttaaggtcgtgttttgctttaggagagtttgaacgtgggatgcagattcattgttctgctgtgaagcttgggttagagatgaatcgttttgttggaacttctttggttgagttttataccaagtgtggttgttgtagtgttgaagcgtggaaattgctttcgttggtgaaggatggcggtgatgttgtgtcttggacgacaatgttgtcttctttagtggaaaatggtaaatggggtgaagcttttgaaatctatgttaaaatgattgaatcaggtgtttatccgaatgaatttacgtttgttaaattgttaggtgccgtgtcttcctttcttggtttatcgtatgggaaactgctgcatgcacatttaatcatgtttggtgctgaattgaatttggtgttgaagacagctgttgttgatatgtattcaaaatgcagacggatggtcgatgctattaaggtttctaatctgacacctgaatatgatgtgtacttatggaccacccttatctctggatttactcaaaatttgcaggttagagaggctatcagtgtttttcgtgatatggaattatctggcctcctaccaaataattttacgtattctagtttattgaatgctagctcctcaattttatcattggacttaggggaacaatttcattcgcgggttatcattgttggacttgaggatgatctttatataggaaatgcactggttgatatgtacatgaaatgctcccacatcactacaaatgctgtgaaagtttttagagagataacatcaccaaatgtcatgtgttggacttctttgattgctggttttgcagaaaaaagattagaagattcttttcagttgtttgctgagatgcaagcagcaggagtaagaccgaattcctttacaatgtctgccattcttggagcttgcagcaaaacgaggtctcttgttccaacaatgatgctccatggacatatcataaaaacaaaagtagacatagatatagctgttgcgaatgctcttgtagatacttatgctggagtggggatgattgacgaggcatggtctgtaattggtacaatgaatcttagagattcaatcacgtacacatgtttagccgcaaggctaaaccagaaggggcatcatggaatggcattaaaagttttgattcacatgtgcaatgatgggattaaaatggatgaatttagcttggcaagtttcttatcagctgcagctggcttaggcactatggaaactggaaagcagctgcattgttattctgtcaaatcaggcttccagagatgtcactcagtttcaaacagcttagttcacttgtacagcaaatgtggtagtattcacgatgcaaatagagcttttaaagatattagtgagccagatgcattttcatggaacggtttgatatctggattttcttggaatggcttgatatcccatgctctttctacttttgatgacatgaggttagcaggagttaaacctgattctataacactgttgtcgctgatttctgcttgcagccatggcggcttattagaactgggtcttgagtatttccattctatgcaaaaagaataccatataaccccaaaactagatcactacatgtgtttagttgatcttcttggtagaggtggtcgcctagaggaagctatgggagttattgaaaaaatgtctttcaagccagactctttgatttgtaaaactttattaaatgcttgcaatttacacggaaatgttgctctaggagaagatatggcaaggcgatgtcttgagcttgatccatctgatcctgcaatatatttgttgcttgcaaacttatatgacaacgctggactctctgattttggagagaagacacgtcggttgatgagagaaagaggtttaaggagaagtcctgggcagtgctggatggagataagaagcagagttcatcacttctccgcaggagagaagataaacgaagacgagattactgaaaagctggagtttcttataactgaatttaggaataggcggtatcaataccaagagaatgaagataagttttaccacccagagcaattggcagttgcatttggtgttcttaatgcaccatctacgtctccaattcgtatatacaagaattcactgatctgctctcactgccatacttttataatgctttccacgcaagtgattggtagggagataattatgagggataggaaacggttccatttctttaaggatggacaatgttcttgcagaggtcacctatga

SEQ ID NO: 240 - protein, 76 aa, Medicago truncatula
MKKQLAPLVLFSLTLITSLIHSTTAAAATSGNHNITHILVKHPGFSTFNHYLTITHLVDEIPLIQDHTMNIRSYMT

SEQ ID NO: 241 - DNA, 288 bp, Medicago truncatula
atggtggcagtcaaaatcatggggcaggataaatatatgataaacatcactgcaatggttaacggctctgtggccatcagcaacaacattgttcgagctctcgttacttggacattgtatgatcgctctctggttgttgtttacgccttctccaaggtgttgatgcccaaagagctttcccatatttcaaatcatgcgcccatcacctccgatgtcaccgcccctgctgtttattgctttaagatttctgttgttttacttcttcttcttcttgtactatggatttag

SEQ ID NO: 242 - protein, 292 aa, Medicago truncatula
MNQIFLFSLLLLASIFSSTTLAQSPAAAPKAPEKPAPTKPAPAKPTPSTPAPAPAKPLVPALPQSPTTNPDASGNQDIIKILRKAKSFNTLIRLLKTTQIINQVNAQLVTTKNGGLTILAPDDGAFSELKAGYFNSLGERQQKELIQYHVLPEYVSSSNFDSLSNPVLTLASDSPQGFQINVTAYGNSVNISTGVVDTTITGIVYADKTLAIYHVNKVLIPLDFIKPKAKAPAPAIAKAPKAEKENSSADDDDQTQAHKDSSDAISLNNMHGISVLVSIGVSLLAAGVTTML

SEQ ID NO: 243 - DNA, 789 bp, Medicago truncatula
atgaaggtttcaatgatttttcttgtgtccactctgctgcttctgagctcatcggcatttgctaaaactgtaagtccaccctctccccccgctgagagtccaactccggctccagcaccagcacctacaccagatttcgtaaacctcactgaattactcactgttgctggtccatttcacacttttcttcaataccttcaatccacaaaagttttggacactttccaaaaccaagcaaacaacactgaagaaggaatcactatctttgttccaaaagacagttctttcgcatcattgaagaaaccttctttatccaaactcaaagatgatgagataaaacaagtgattcttttccatgctttgccacatttctattcacttgctgatttcaaaaaccttagccaaactgcctcaactccaacatttgccggtggtgattacactttgaatttcaccgataattccggaactgtcaaaattaattcaggatggtcaatcactaaggtgactagtgcagttcatgctactgatcctgttgcaatttatcaagttgataaggttttgcttcctgaggcaatatttggcactgatattccacctgttctggctcctgcacccacaccagaaattgcgcctgcagccgattctccaactgaacaaagtgctgacagcaaatcgtcttcaccttcatcttcaccagatcgttcgtcttcttacaagatcgttagctatggaatttggggcaaccttgtgttggcaacttttggtttggtggtggtaatcttgtga

SEQ ID NO: 244 - protein, 148 aa, Medicago truncatula
MSSNVAFFFVFALLATTAFGEAPSTSPTAAPKASHAAPAPKATATPPSSTTTPPKSSATSPTSSPAPKVSSPPSPTPTSAEAPVESPTESPPAPVSPTVSPATSPVASGPAVSDAPAEAPAGSSAAASFRVSFVGGSVAAFVAAALLM

SEQ ID NO: 245 - DNA, 834 bp, Medicago truncatula
atgaagcaaattctcttcttcacactcttagtactattaggtcatatcttttttaccacaactttagctcaatcacctgctgcagcacctaaagccccggaaaaacctgctcccgccacaccagctcctgcaacagcaccagcaaaaccattagtcccttcattacctcaatcgccctcatccgattcttcgtccggtcaagacatcatcaaaattctacgtaaagcgaaatcattcaacacgttaatccgtttgctcaaaaccacacaaatcatcaaccaaattaactcacagctggtgacaacaaaaaacggtggtttaaccatccttgcacctgatgacggtgcctttttgcagctgaaagccggatacttcaactccctcggtgaacgccaacagaaagaattgatacagtttcatgttcttcctgtttacgtctccagctcaaattttgattcgcttagcaacccggtgctgacacttgccagtgatagcccttctggttatcatatgaatgtgactgcttatggaaacaatgttaatatatcaactgggccggttaatgctacactcacagggattgtttactctgataagacacttgctatatatcatgttgataaggtgcttattccattggacttctctaagcctaaggctctagctcctgctccttctacggcaaaggcgcctaaagcagataaggatagttcatctgaagatggtgatcaaggagagtcaactaaagctacttctggtgcaaacaatttgattagccttcaaggaacaatgtttgtgtcccttttggttgcagcagtaaccatgttcggttga

SEQ ID NO: 246 - protein, 316 aa, Medicago truncatula
MKNMMQQSLISTSFFLLAIAFYTPTTLAQLSPIQTPSTSSPSPPLPSTTASPPLPATTATAPSPGLSTVPLVPTTPTGAPSPTITVPKGPTIDIINILQKAKRFSVLIRLLKTTQLINQLNSQLVSSPSGSGGLTIFAPEDSAFSKLKAGFLNSLTDRQKVELLQFHSLASFVSISNFDTLTNPVQTQAGDDARLQLNVTTYGGSQVSMATGAVNATVTGTVYTDSKLAIYQVDKVLMPLDLVLPAKAPALAPAPAKGLLPKAGKTNSSVADDGSGAGSDDGDGKDLPADVSAAGSVMWVNAVVVFGMGLVGGAVL

SEQ ID NO: 247 - DNA, 816 bp, Medicago truncatula
atgttctcctcattgtattctcccaacatagcagcaacagcgacagcaacagcaccagcacaagcagcatcaccgaaacatgccccggcaccaaaagcagcgtcaccaacatcgacaaaaccattagtcccgacattaccagacacctcagattccaccccggacgacataacaaaaatcctcaaaaaggcgaaaacattcacaatcctaacccgtctcctaagaacaacacaaatcgtggacaacctaaactcacaactcatatcagcaaaaagcggcggattaacaatcttggcaccggatgactcagctttctcgcatctcaaagcagggttcttcaactcgctaaacgaaaacaaaaaaatcgaactattacaattccacattcttccacagtttgttgatagcaataactttgattctcttagtaaccctgttgagacagtggctggtaaagaccctttaaagcttccattgaacatcgaatcgtttggtaccagtgttagtctttcaactggtgtggttaatgctagtgttactggtgtagtctatcaagataacaagcttgctatatatcgtttggataaggttttgcttcctcttgatttctttgggactaaggcacctgctgctgctcctgttgcggaagcaatagcaccgaaagctgataagacaaagtcttcttctgaagaagatgaggatgatacaacaacacaggataaaaaaagttctggagcaaatttacttggaattcaaggaacagcttatatatctattggagtagcttttgttgcagtggcaatgttatggagttga

SEQ ID NO: 248 - protein, 256 aa, Medicago truncatula
MAKLFNFFPLFFLNVFIIVTLFQRISAQPAISPAPSGPLNITKVLEKAGQFTTFIKLLKATQVSDRINSQLNNSNQGLTIFAPTDNAFSSLKSGTLNSISTQNQLQLLQFHILPTLYTISQFQTASNPLHTQAGNSDDGEYPLNVTTSGNQVNVTTGVIDTTVSNTIYSDNQLAVYQVDQVLLPMALFGQGPTAAPAEAPAPTKPEKSVRASDAPKGSSDSPADDSSAVGLNGYIVNGATLFVAVFANVVVSCLWM

SEQ ID NO: 249 - DNA, 891 bp, Medicago truncatula
atgatgttgaagaagcaatctcatcttttgtccttctcacttgcaatactaatttctctcttgtattccactaccattactttatcccaattatcaccatcaccagctgctgctccaatacaccctacattaccagctccaaccacaccagctgcagcccctaaaccattggtaccttcattaccagaggcacccagtgattccacccctgacagttcaggggccgttgacatcgttggaatcctaaggaaggcgaagtcattcaacgtcctaatccgacttatgaaaacaacacaattgatcaaccaactcaattcacaactattggcaacaaaatcaggtgggttgacaattcttgcaccggatgacaacgccttttcacaactcaaagcaggatttctcaactctctttccgatggacagaaactcgagctgttacagttccacgttatttcagactacgtatctagctctaatttcgatactttgacaaaccctgtgagaacacttgctggagctaaacccggaaaggtggaactgaatgtgataagttacggtggaagtgtgaacatatcaacaggggaagtgaacacaacgatcgatggcattatatatactgataaacgtcttgctatttataaagttggcaaagtgcttcttcctatggatttcttttctgttgctaaggcaccaacaaagggactgtctttggcaccagagccttcaacaatgactccaaaagccgataaggagaagccattatcgccagattcctcagattcatctgttaaacccacaaatgataactctggtgctgtgaaagtgaatgtgtatggaaggtgggcgtctcttgtttttggagcagttctcgtgactatgatgccacaataa

SEQ ID NO: 250 - protein, 292 aa, Medicago truncatula
MIKIQSLLSFSLAIIVSLLFSTTTTLSQLSPATAPIQPTLPAPTTPAAAPKPLVPSLPESPSDSTPDTAGTVDIVGILRKAKAFNVFIRLMKTTQLINQLNSQLLATKTGGLTILAPDDSAFSGLKAGFLNSLSDGQKLELLQFHVISDYVSSSNFDTLTNPVRTLAGDKPGKVELNVVSYGGSVNISTGEVNTTINGIVYTDKRLAIYKVGKVLLPMDFFSVAKAPGKAPSLAPEPSTDSAKAPKPDKDTSSDSSQVINPTEDKSSSVKIVYGKFVSLGLVLAFVMIMMQT

SEQ ID NO: 251 - DNA, 882 bp, Medicago truncatula
atgttgacaaataaaaaacaatgcatctcactaaccctactagtcatttccctcttttgttccaacactttagcagcattatctcctgccacgtcaccaattcaatctccccctacccaaccaatttcatccccaacaaaacccttagtccccacatttccaccaaatgacaatactacccctgaaactcccacccccacaacagacatagttcaaatcctaaaacaagccaattcattcaacattttcctccgtctcatgaaaacaactcaactaatcaaccagctcaactcacagctcctaaccataaaatccggcggcttaacgatcctcgcacccgacgattcagctttctcagaactcaaaccagggttcctcaactcactctccaatgaaaaaaaacttgaactacttcaattccatgttatttctgattttgtatctagctctaactttgatacattaaccaaccctgtgagaacacttgctggtaacaaacctggaaaagttgaacttaacgtgattagttatggtggaaatgtgaacatttcaaccggaagtgttaacacaacgattaatggaatcatatataccgataaacatcttgctatttataaagttggtaaagtgcttattccatcagaattttctcctgctaagaaaattgttgctgaggttccggctttggcgccagcaccagctattgctgatgctaaggcgccgacgcctgaaaaagaaaaaccatcatcatctgaagattcaacaacttcgcaggttgttcctgctgtgacttctagtgctatgaggattgacatgtgtggaagttgggtggcacttgttgttggaattgtcttcatcggaggtttttacaacaaaaactaa

SEQ ID NO: 252 - protein, 316 aa, Medicago truncatula
MRNMMQQSLISTSFLLFAITFYTSTTLAQLSPIQSPTTSSPSPPLPSTTASTPLPATTATAPSPGLSTVPLVPTTPAGAPSPTITVPKGPTIDIINILQKAKRFSVLIRLLKTTQLINQLNSQLVSSPSGSGGLTIFAPEDSAFSKLKAGFLNSLTDRQKVELLQFHSLASFVSISNFDTLTNPVQTQAGDDARLQLNVTTYGGSQVSMATGAVNATVTGTVYTDSKLAIYQVDKVLMPLDLVLPAKAPALAPAPAKGLLPKAGKTNSSVADDGSGAGSDDGDGKDLPADISAAGSVMWVNAVVVFGMGLVGGVVL

SEQ ID NO: 253 - DNA, 2565 bp, Medicago truncatula
atgcaaatgctatgtaccaaaactttttcactatcccgcttccaagaaacttgtttacgtgttctttcattctgcaactcaaactctctcaaagaaggaatatgcattcatagccccataatcaaacttggtcttcaacatgacttgtatttaaccaacaatttactctctttatatgctaaaacctttggagttcatcgagcacgccacttgttcgatgaaatgcctaacagagacgtcgtatcatggacaacgattctgtcttcacacaccaagactaagcatcattctgatgccctgcagttgtttgatatgatgataggttctggtgagtatccgaatgagtttacactgtctagtgcgttaaggtcgtgttttgctttaggagagtttgaacgtgggatgcagattcattgttctgctgtgaagcttgggttagagatgaatcgttttgttggaacttctttggttgagttttataccaagtgtggttgttgtagtgttgaagcgtggaaattgctttcgttggtgaaggatggcggtgatgttgtgtcttggacgacaatgttgtcttctttagtggaaaatggtaaatggggtgaagcttttgaaatctatgttaaaatgattgaatcaggtgtttatccgaatgaatttacgtttgttaaattgttaggtgccgtgtcttcctttcttggtttatcgtatgggaaactgctgcatgcacatttaatcatgtttggtgctgaattgaatttggtgttgaagacagctgttgttgatatgtattcaaaatgcagacggatggtcgatgctattaaggttagagaggctatcagtgtttttcgtgatatggaattatctggcctcctaccaaataattttacgtattctagtttattgaatgctagctcctcaattttatcattggacttaggggaacaatttcattcgcgggttatcattgttggacttgaggatgatctttatataggaaatgcactggttgatatgtacatgaaatgctcccacatcactacaaatgctgtgaaagtttttagagagataacatcaccaaatgtcatgtgttggacttctttgattgctggttttgcagaaaaaagattagaagattcttttcagttgtttgctgagatgcaagcagcaggagtaagaccgaattcctttacaatgtctgccattcttggagcttgcagcaaaacgaggtctcttgttccaacaatgatgctccatggacatatcataaaaacaaaagtagacatagatatagctgttgcgaatgctcttgtagatacttatgctggagtggggatgattgacgaggcatggtctgtaattggtacaatgaatcttagagattcaatcacgtacacatgtttagccgcaaggctaaaccagaaggggcatcatggaatggcattaaaagttttgattcacatgtgcaatgatgggattaaaatggatgaatttagcttggcaagtttcttatcagctgcagctggcttaggcactatggaaactggaaagcagctgcattgttattctgtcaaatcaggcttccagagatgtcactcagtttcaaacagcttagttcacttgtacagcaaatgtggtagtattcacgatgcaaatagagcttttaaagatattagtgagccagatgcattttcatggaacggtttgatatctggattttcttggaatggcttgatatcccatgctctttctacttttgatgacatgaggttagcaggagttaaacctgattctataacactgttgtcgctgatttctgcttgcagccatggcggcttattagaactgggtcttgagtatttccattctatgcaaaaagaataccatataaccccaaaactagatcactacatgtgtttagttgatcttcttggtagaggtggtcgcctagaggaagctatgggagttattgaaaaaatgtctttcaagccagactctttgatttgtaaaactttattaaatgcttgcaatttacacggaaatgttgctctaggagaagatatggcaaggcgatgtcttgagcttgatccatctgatcctgcaatatatttgttgcttgcaaacttatatgacaacgctggactctctgattttggagagaagacacgtcggttgatgagagaaagaggtttaaggagaagtcctgggcagtgctggatggagataagaagcagagttcatcacttctccgcaggagagaagataaacgaagacgagattactgaaaagctggagtttcttataactgaatttaggaataggcggtatcaataccaagagaatgaagataagttttaccacccagagcaattggcagttgcatttggtgttcttaatgcaccatctacgtctccaattcgtatatacaagaattcactgatctgctctcactgccatacttttataatgctttccacgcaagtgattggtagggagataattatgagggataggaaacggttccatttctttaaggatggacaatgttcttgcagaggtcacctatga

SEQ ID NO: 254 - protein, 216 aa, Medicago truncatula
MFQIVLIVTIILSSSSLSSLNLSSPITSSSSSPSSSFLNLTKILYSSHTFFKAASEFHSLGIDSEIDTRYSTTVFVPDDKAFANATVSKRYESLSDDNKYFVLKCHMLKEYLPPAVLRKIANDMHLQDTVATEIMGQATYRINITVMVNGSVAVSNNIVRALVTRTLYDRSPIAVYAVSKVLMPKELPALITSDVTAPNVYCFKFSVVLILLVLWI

SEQ ID NO: 255 - DNA, 231 bp, Medicago truncatula
atgaagaagcaactagcaccacttgttctattttccctcacacttataacatcactcattcattccaccaccgccgctgccgccacctctggcaaccacaacatcacccacattctagtcaaacaccctggcttctccaccttcaaccattacctcaccataacccacctcgtcgacgaaatacctttaattcaagatcacacaatgaatattagaagttatatgacatag

SEQ ID NO: 256 - protein, 295 aa, Medicago truncatula
MMKLRSLFFASILQLLILTLYYSTTTSAQISPVQSPQASTPAPGFNTVPLVPVTPSGAPTPNILPKSPSIDIIQILKKAKRFSVLIRLLKTTQLINQLNSQLVTSSSSDSSSGGLTLFAPEDNAFSKLKPGFLNSLSDRHKVELLQFHTLSSFISISNFDTLTNPVQTQAGDDAKRLQLNVTTSGGSHVSMTTGTVNATVTGTVYTDNKLAIYQVDKVLVPLDLVLPAKAPAPAPVSKGDSAKPDDRSKSSSAKDDDDENNDLPAEASGAGYSNVDGMWLALVFGMVLLAGEAML

SEQ ID NO: 257 - DNA, 879 bp, Medicago truncatula
atgaatcaaattttcttgttctcactcctactacttgcctccatcttctcaagcaccactttagctcaatcaccggctgcagcaccaaaagcaccagaaaaaccagcacctacaaaaccagcccctgcaaaaccaaccccttcaacacctgctccagcaccagcaaaaccattagtcccagcattaccacaatcacctacaacaaatcctgatgcatcaggaaaccaagacataatcaagattctaagaaaagccaaatcattcaacacactaatccgtttgctcaaaacaactcaaatcatcaaccaagtcaatgcacagcttgtaactacaaaaaatggaggcttgacaattcttgcaccagatgatggtgccttttcagaactcaaagcaggttacttcaattccttgggagaaagacaacaaaaagaattgattcagtatcatgttcttcctgaatatgtatcaagttctaattttgattcactcagcaaccctgtgttgacattagcaagtgatagcccacaaggatttcagattaatgtgacggcatatggaaacagtgtgaatatttcaaccggggttgttgatacaaccatcacaggaattgtttatgcagataagacacttgctatatatcatgtgaataaggttcttattcctttggattttattaagcctaaagctaaagctccagcaccagctattgctaaggcacctaaagctgagaaagagaattcatcagcagatgatgatgatcagactcaggcacacaaggatagttctgatgccattagcttgaataacatgcatggaatatcagtgttggtttccatcggagtttctctgcttgcagctggagtaacaactatgttgtga

SEQ ID NO: 258 - protein, 277 aa, Medicago truncatula
MKQILFFTLLVLLGHIFFTTTLAQSPAAAPKAPEKPAPATPAPATAPAKPLVPSLPQSPSSDSSSGQDIIKILRKAKSFNTLIRLLKTTQIINQINSQLVTTKNGGLTILAPDDGAFLQLKAGYFNSLGERQQKELIQFHVLPVYVSSSNFDSLSNPVLTLASDSPSGYHMNVTAYGNNVNISTGPVNATLTGIVYSDKTLAIYHVDKVLIPLDFSKPKALAPAPSTAKAPKADKDSSSEDGDQGESTKATSGANNLISLQGTMFVSLLVAAVTMFG

SEQ ID NO: 259 - DNA, 783 bp, Medicago truncatula
atgggtttgagaaacacctctgttctgtgcttggcacttatgttgtctttctcttcggccattaattgtttggacataaccaaaactttgggacaatatccggaactctccacgttcagcaaatacctaaccgaaaccaagttggctgaacaaataaacagtggtaaagccgttaccattcttgcccttgacaacaaagctattgcttctctttctggtaaaccaattgacgccattaaagccgttattgggacccatgttatacctgaattctacgatgagaaaaaactttttgatatcattggaagccatgcacaattgcctacactttcaaccgctccaggtttagccgctaaaatctacgtgtcacttattaatgaaggtgaaatggcatttagttctgctgttgaaggctcaaccttcgatgccacgcttgttcaaagcactgaggctgaaccaggcgttgtttcaattctccaggtttcacagccaattgttaaggttggtgcttcagctccagcaactccagcaacactatcaaaaccagcaacacctgcagctgtgtcaacatccagtgccggtgaggttgcaacaccagcagctgtgccagcatccggtgccggtcaggttacaacaccagcagcatcaccttctgtggtgattgctgagtcacctgagagttttggtgatgcacctgctcctgctcctagtgcctcttctcgtgccacattcagattcattggtgctgttattgcctttgcttccatttttgtctctttgtaa

SEQ ID NO: 260 - protein, 271 aa, Medicago truncatula
MFSSLYSPNIAATATATAPAQAASPKHAPAPKAASPTSTKPLVPTLPDTSDSTPDDITKILKKAKTFTILTRLLRTTQIVDNLNSQLISAKSGGLTILAPDDSAFSHLKAGFFNSLNENKKIELLQFHILPQFVDSNNFDSLSNPVETVAGKDPLKLPLNIESFGTSVSLSTGVVNASVTGVVYQDNKLAIYRLDKVLLPLDFFGTKAPAAAPVAEAIAPKADKTKSSSEEDEDDTTTQDKKSSGANLLGIQGTAYISIGVAFVAVAMLWS

SEQ ID NO: 261 - DNA, 753 bp, Medicago truncatula
atggtgatgatgaaacatccattcctctctttcacacttcttctaattgtttttttctcttccaccaccactttagcccagaaatcacctgctccggccccttcgactgataccgccccaaccgacattatcagaatcctcaaaaaggctggagggttcaccacgctaatccgtcttctccaaaccacacaagtgtccacccaaatcaactctcaactcttaaactcgaacggtggtttaaccttgtttgcaccaaacgacaattccttttcaagtctcaaacccggcttcctcaattcgcttagcgatgaacaaaagaacaagctcatccaattccacttgctacctacatttgtatccatgtcaaattttgatactttgagcaacccggtgagaacacaggctggtgatgacccttataggttgggactgaatgtaacaagttcaggaaaccaagtgaacatgacaacaggtattgttaatgtcacagtcggtggcactgtttacaccgatcaccagcttgcagtttaccaagtggacaaagtgctccttcctcgggatttctttgttgctaagcctcctgctccggctccagcaccggaaaagactaagtcgtctaagaagaaatcttctgatagcgatggtggagttgcaggagacgatgattctggtgctgttaatgtaaaacaaagacgtctgatgttggttcctgttgctgttgctacaatcatagtagcaatatattcatggtga

SEQ ID NO: 262 - protein, 296 aa, Medicago truncatula
MMLKKQSHLLSFSLAILISLLYSTTITLSQLSPSPAAAPIHPTLPAPTTPAAAPKPLVPSLPEAPSDSTPDSSGAVDIVGILRKAKSFNVLIRLMKTTQLINQLNSQLLATKSGGLTILAPDDNAFSQLKAGFLNSLSDGQKLELLQFHVISDYVSSSNFDTLTNPVRTLAGAKPGKVELNVISYGGSVNISTGEVNTTIDGIIYTDKRLAIYKVGKVLLPMDFFSVAKAPTKGLSLAPEPSTMTPKADKEKPLSPDSSDSSVKPTNDNSGAVKVNVYGRWASLVFGAVLVTMMPQ

SEQ ID NO: 263 - DNA, 447 bp, Medicago truncatula
atgtcttccaacgttgctttcttcttcgttttcgctttactcgccaccaccgcttttggtgaagcaccttccacctcacccaccgccgcaccaaaagcttcacacgctgcgcctgcacctaaagccaccgccactccaccttcttccactaccacaccaccaaaatcatccgccacatcaccaacatcctcaccagctcccaaggtttcatctccaccttctccaacaccaacctccgctgaagctcccgttgaatctcccaccgagtctccacccgctcccgtttctcccaccgtctctccagcgacctctcccgttgcttctggacctgctgtcagcgatgctcctgctgaggctcccgctggttctagcgccgccgcttcattcagagtctccttcgttggcggatctgtcgccgctttcgtcgctgctgctttactgatgtag

SEQ ID NO: 264 - protein, 293 aa, Medicago truncatula
MLTNKKQCISLTLLVISLFCSNTLAALSPATSPIQSPPTQPISSPTKPLVPTFPPNDNTTPETPTPTTDIVQILKQANSFNIFLRLMKTTQLINQLNSQLLTIKSGGLTILAPDDSAFSELKPGFLNSLSNEKKLELLQFHVISDFVSSSNFDTLTNPVRTLAGNKPGKVELNVISYGGNVNISTGSVNTTINGIIYTDKHLAIYKVGKVLIPSEFSPAKKIVAEVPALAPAPAIADAKAPTPEKEKPSSSEDSTTSQVVPAVTSSAMRIDMCGSWVALVVGIVFIGGFYNKN

SEQ ID NO: 265 - DNA, 843 bp, Medicago truncatula
atgaagcaaatcatcttcttcacgctcttggtactttttgctcaaatcttttttaccacttcttcagctcaatcacctgctgcagcacctaaagcagcagcgaaacctgcccctgccacgccagctccagcaacagcaccggcaaaaccattagtcccctcattgcctcaaccaccctcatccgattcatcttccggccaagacatcattaaaatcctaagaaaagctaaatcattcaacacactaatccgcttgctcaaaaccacacaaatcatcaaccaaattaactcacagctggtgacaacaaaaaacggtggtttaaccatcctcgcaccagatgatggtgccttttcccagctcaaagccggatacttcaattccctcggtgaacaccaacagaaagaactgatacagtttcatgttcttcctgtttacgtctcaagctcaaattttgattcgcttagcaaccctgtgctgacacttgccagtgatagcccttctggttatcatatgaatgtgactgcatatggaaacaatgtgaatatatcaactgggcctgttaatgctacactcacagggattgtgtattctgataagacacttgctatatatcatgttgataaggtgcttattcctttggacttctctaagcctaaggctctagctcccgctccttctacggcgaaggcacctaaagctgataaggatagttcatctgaagatggtgatcagggtgagacaactaaggctacttctggtgccaacaatttgattagccatcaaggaacaatgtttgtgtctctttttgttggtttagttgcagctataactatctccatttga

SEQ ID NO: 266 - protein, 46 aa, Medicago truncatula; identical to SEQ ID NO: 234

SEQ ID NO: 267 - DNA, 951 bp, Medicago truncatula
atgaaaaatatgatgcaacaatctctcatttccacctcattctttcttctagcaattgctttctacactcctaccactttagcccaactctcaccaattcaaaccccatcaacatcatcaccctcaccacccttaccatcaacaacagcatcaccaccattaccagcaacaacagcaacagcaccatcaccaggattaagtacagttccgcttgttccaacaacaccaactggtgcaccatcacccaccataacagtcccaaaaggacccaccattgacataatcaacattcttcaaaaagccaaaaggttctccgttctaatccgtcttctcaaaacaacacaattaatcaatcaactcaactcgcagctggtatcatcgccatcaggttccggagggttaaccatttttgcaccagaagattctgcattctccaaactcaaagcagggttcctcaactccctcactgatagacaaaaagtcgaactcttacagtttcactcccttgcttcattcgtttctatttcaaacttcgataccttaaccaaccctgttcaaacacaagccggtgatgatgctaggcttcaactgaacgtcactacttatggtggcagtcaagttagtatggctaccggagcagtcaatgctaccgttaccggtactgtttataccgacagcaaacttgctatttatcaggttgataaggtacttatgcctcttgatcttgttcttccggctaaggctccagctctggctcctgcaccagctaagggtttgttgcctaaggctggaaaaacgaattcttcagttgcagatgatggtagtggtgctggtagtgatgatggtgatggtaaggatttacctgctgatgtttctgctgcagggtctgtgatgtgggtgaatgctgttgttgtttttggaatgggtttggttggtggagctgttctataa

SEQ ID NO: 268 - protein, 260 aa, Medicago truncatula
MGLRNTSVLCLALMLSFSSAINCLDITKTLGQYPELSTFSKYLTETKLAEQINSGKAVTILALDNKAIASLSGKPIDAIKAVIGTHVIPEFYDEKKLFDIIGSHAQLPTLSTAPGLAAKIYVSLINEGEMAFSSAVEGSTFDATLVQSTEAEPGVVSILQVSQPIVKVGASAPATPATLSKPATPAAVSTSSAGEVATPAAVPASGAGQVTTPAASPSVVIAESPESFGDAPAPAPSASSRATFRFIGAVIAFASIFVSL

SEQ ID NO: 269 - DNA, 2409 bp, Medicago truncatula
atgggagaggtagacccaactttcgttcaagagctagaacacagaccaaaactctccctcatagaagccaaaggtattccagaaattgatctctctccaatattccacaatgaagttccaaatccatctgctattgaaagcttagtcaaggagattggaagtgcatgcaaagcgtggggattctttaaagtcacaaaccatggagtccctttgagtctcaggcagaggcttgatgaagctgctagattgttctttgctcagagtttggaggagaagaagaaggttgctagagatgagatcattccaactggttattatgacactgaactcaccaagaatgttagagacatgaaagaagtgtttgatttttacaccaatgaccctttctttcctctcactcctcatgaaaatgatgatcgagttattcaatggtgtaatccaacacctccatacccttcaaacttcagagttataattgaagagtatatcgaagagatggaaaagctggcccgtaagttattggagcttatagctttaagcttaggacttgaagcaaagaggtttgaagaattcttcaagtatcaaactagctttataagattcaactactatcctccatgcccttaccctcacctagctcttggccttggaagacacaaggatgctggtgccttgactattcttaccctaaatgaggttgaaggtcttgaagtgaagcgtaaaacagatcaacaacgggttcttgtaaaacctacccgagatccgtatattatcaacattggcggtattattcaggaaattggaagtgcatgcaaagagtggggtttcttccaagtcacaaaccatggagtcccttcgagtcttaggcagagacttgatgaagctgctaaattgttctttgctcagagtttggaggagaagaggaaggttgctagagatgaaatcaatccaactggttattatgatacagaacacaccaaaaatgttagggactggaaagaagtgcttgattttctcgccaacgatcccactttggttcctctgaattctgatgaaaacgatgatcaatttattcaatggtctaatccatccccacaattcccttcacacttcagggctatagttgaagagtataatgaagagatggaaaagttggcttacaagttgcttgagctaatagctttgagcttaggagttgaagcaaagaggtttgaagagttcttcaaagatcacactagctttattagattcaaccactatcctccatgcccttaccctcacctagctctcggcgttgggcgacacaaggatgctggtgccttaactattcttgcccaagatgatgttgggggtcttgaagtgaagcacaaagcatcacaagagtgggttcttgtgaaacctacctcagatgcttacattatcaacgtttgtgatattatccaggtttggagtaatgatgcctatgagagtgtggagcatagagtaatggtgaacaaggagaaagagaggttttctattccattcttcttcaatccaggacatgatgctgaaatcaagcctttggaggagcttacaaataagcaaaactctccaaaatataagccatataaatggagtttggaggagaagaagaaggttgctagagatgaggtcaatcctactggttattatgatacagagcataccaaaaatgttagagactggaaagaagtgtttgattttctttctcaagatcctacattagttcctcggagttctgatgaacatgatgatggtgttattcaatggactaatcaatcacctcaatatcctccacaattcagggctatacttgaagagtatattcaagaggtggaaaagctggcatataggttgctggagctaatagctctaagcttaggacttgaagcaaagaggtttgaagaattcttcaagtatcaaactagctttattagattcaaccactatcctccatgcccttaccctcacctagcacttggagttggacgacacaaggatgctggtgccttaactattcttgcccaagatgaggttggaggacttgaagtgaagcgtaaatcagaccaacaatgggttcttgtgaaacctaccccagatgcttacattatcaatgttggtgatatcattcaggtttggagcaatgatgcttatgaaagtgtggaacacagagtgatggttaactctgagaaagaaaggttttcaatccccttctttttcttccctgcacacgacactgtagtcaaacctctcgaggagctgacaaatgaggaaaaccctccaaaatacagaccatacaattggggaaagtttcttgtcaacagaaagagtagcaatttcgagaagaaaaaggtggagaacattcaaatttatcattataagatagcttaa

SEQ ID NO: 270 - protein, 250 aa, Medicago truncatula
MVMMKHPFLSFTLLLIVFFSSTTTLAQKSPAPAPSTDTAPTDIIRILKKAGGFTTLIRLLQTTQVSTQINSQLLNSNGGLTLFAPNDNSFSSLKPGFLNSLSDEQKNKLIQFHLLPTFVSMSNFDTLSNPVRTQAGDDPYRLGLNVTSSGNQVNMTTGIVNVTVGGTVYTDHQLAVYQVDKVLLPRDFFVAKPPAPAPAPEKTKSSKKKSSDSDGGVAGDDDSGAVNVKQRRLMLVPVAVATIIVAIYSW

SEQ ID NO: 271 - DNA, 771 bp, Medicago truncatula
atggctaagctattcaatttctttcctctcttttttctcaacgtattcatcattgtgacattgtttcaaagaatttcagctcaaccagctatatcaccagcaccatcaggaccattaaacataaccaaagtcctagaaaaggcaggacaattcacaacattcatcaagctactaaaagcaacacaagtatccgaccgaatcaactcacaactcaacaactcaaatcaaggcctaacaatttttgcaccaacagataatgccttctcgagtctaaaatcaggaacactaaactcaatcagcacacaaaaccaacttcaacttctacagtttcatattctaccaacactttacacaatatcacagtttcaaactgcaagtaaccctctacacacacaagctggaaacagtgatgatggagagtatcctcttaatgttactacttctggaaatcaagttaatgtaacaactggtgtgattgatacaactgtttctaatactatttatagtgataatcagcttgcagtgtatcaggttgatcaagtgcttcttcctatggcactttttggacaaggtccaaccgctgcgcctgcggaggctcctgcaccgactaagccggagaaaagtgttcgggcttctgatgctccaaaagggtcttcggatagtccggctgatgattcgagtgctgttggtttgaatggctacatagttaatggtgctacattgtttgttgctgtttttgccaatgttgttgtttcttgtttgtggatgtaa

SEQ ID NO: 272 - protein, 280 aa, Medicago truncatula
MKQIIFFTLLVLFAQIFFTTSSAQSPAAAPKAAAKPAPATPAPATAPAKPLVPSLPQPPSSDSSSGQDIIKILRKAKSFNTLIRLLKTTQIINQINSQLVTTKNGGLTILAPDDGAFSQLKAGYFNSLGEHQQKELIQFHVLPVYVSSSNFDSLSNPVLTLASDSPSGYHMNVTAYGNNVNISTGPVNATLTGIVYSDKTLAIYHVDKVLIPLDFSKPKALAPAPSTAKAPKADKDSSSEDGDQGETTKATSGANNLISHQGTMFVSLFVGLVAAITISI

SEQ ID NO: 273 - DNA, 891 bp, Medicago truncatula; identical to SEQ ID NO: 249

SEQ ID NO: 274 - protein, 802 aa, Medicago truncatula
MGEVDPTFVQELEHRPKLSLIEAKGIPEIDLSPIFHNEVPNPSAIESLVKEIGSACKAWGFFKVTNHGVPLSLRQRLDEAARLFFAQSLEEKKKVARDEIIPTGYYDTELTKNVRDMKEVFDFYTNDPFFPLTPHENDDRVIQWCNPTPPYPSNFRVIIEEYIEEMEKLARKLLELIALSLGLEAKRFEEFFKYQTSFIRFNYYPPCPYPHLALGLGRHKDAGALTILTLNEVEGLEVKRKTDQQRVLVKPTRDPYIINIGGIIQEIGSACKEWGFFQVTNHGVPSSLRQRLDEAAKLFFAQSLEEKRKVARDEINPTGYYDTEHTKNVRDWKEVLDFLANDPTLVPLNSDENDDQFIQWSNPSPQFPSHFRAIVEEYNEEMEKLAYKLLELIALSLGVEAKRFEEFFKDHTSFIRFNHYPPCPYPHLALGVGRHKDAGALTILAQDDVGGLEVKHKASQEWVLVKPTSDAYIINVCDIIQVWSNDAYESVEHRVMVNKEKERFSIPFFFNPGHDAEIKPLEELTNKQNSPKYKPYKWSLEEKKKVARDEVNPTGYYDTEHTKNVRDWKEVFDFLSQDPTLVPRSSDEHDDGVIQWTNQSPQYPPQFRAILEEYIQEVEKLAYRLLELIALSLGLEAKRFEEFFKYQTSFIRFNHYPPCPYPHLALGVGRHKDAGALTILAQDEVGGLEVKRKSDQQWVLVKPTPDAYIINVGDIIQVWSNDAYESVEHRVMVNSEKERFSIPFFFFPAHDTVVKPLEELTNEENPPKYRPYNWGKFLVNRKSSNFEKKKVENIQIYHYKIA

SEQ ID NO: 275 - DNA, 879 bp, Medicago truncatula
atgattaaaattcaatctctattgtccttctcacttgcaataatagtttccctcttgttttccaccaccactactttatctcaactatcacctgctactgctcctatacaacctacactaccagctccaaccacacctgctgcagctcctaaaccattggtaccttcattaccagagtcacctagtgattccacccctgacactgcaggcactgttgacatcgtcggaatcctgagaaaggcgaaggcattcaatgtcttcattcgactcatgaaaacaactcaattgatcaaccaactcaattcacaactattggctacaaaaacaggtggattaactattcttgcaccagatgacagcgccttttcaggactcaaagcaggattcctcaactctctttctgatggacagaaactcgagctgttacaattccatgttatttcagactatgtatctagctctaacttcgacacattgacaaaccctgtgagaacacttgctggagataaacccggaaaggtagaactgaatgtggtaagttacggtggaagtgtgaacatatcaacaggggaagtgaacacgacaatcaatggcattgtatataccgataagcgtcttgctatttataaagttggtaaagtgcttcttcctatggatttcttttccgttgctaaggcaccggggaaggcaccatctttggcaccagaaccttcaaccgattccgcaaaggcgcctaaacccgataaagatacatcctcagattcgtcgcaggtaattaatccaactgaagacaagtctagctccgtgaagattgtgtatggaaagttcgtgtcacttggacttgtattagcttttgtgatgatcatgatgcaaacatga

SEQ ID NO: 276 - protein, 296 aa, Medicago truncatula; identical to SEQ ID NO: 262

SEQ ID NO: 277 - DNA, 843 bp, Medicago truncatula
atgaaacaagtcactttcttctttttcttttcactctttcttctcttttcatccacattatccatttcacaagcacctgaatcatccccaaaatctcctaaaaaaacaccccctaccccaaaagcaacagcaccatcaccaaaatcattagtccccacattgcctgaatcaccagactcaacagactccgtccctgacgacatcacaacaatccttaaaaaggcgaaaacattctccgtcctaatccgtctcctaaaaacaacagaaatcatgagcagcgtaaactcgcagctcatcacagcaaaaaacggcggcttaacaatcctcgcgccagatgattcagcattttcaagcctcaaagccgggttccttaactccttagacgaaaacaaaaaaatagaacttttacagttccacatcttacctcaatatgtagcgagctcaaacttcgattctttaagcaaccctgttcaaacaatagctggtaaagacccgacaaggcttccacttaatgtttatgcatcaggtaacaatgtcagtctttcaaccggggttgttactgcttccgttgtgggtgttgtgtacactgataacaagctcgcgatttatcatttggataaagtgcttcttcctcgtgatttcttcgctactaaggcacctgctttggctccaactcttgctgctgctgctaaggctcctaaagctgctaataaggaaaattcttctgctgatgatcaagatcaaaatgatcaggatcaaggtaaatccggagcagtgagattgtgtggaattcttggaacaacgttgatgtcttttgttgctgtagcaatgatatggagttga

SEQ ID NO: 278 - protein, 280 aa, Medicago truncatula
MKQVTFFFFFSLFLLFSSTLSISQAPESSPKSPKKTPPTPKATAPSPKSLVPTLPESPDSTDSVPDDITTILKKAKTFSVLIRLLKTTEIMSSVNSQLITAKNGGLTILAPDDSAFSSLKAGFLNSLDENKKIELLQFHILPQYVASSNFDSLSNPVQTIAGKDPTRLPLNVYASGNNVSLSTGVVTASVVGVVYTDNKLAIYHLDKVLLPRDFFATKAPALAPTLAAAAKAPKAANKENSSADDQDQNDQDQGKSGAVRLCGILGTTLMSFVAVAMIWS

SEQ ID NO: 279 - DNA, 3853 bp, Oryza sativa
gtctccttcctcctcgggcacctcttctcctcgcttactcctcagtcccccacccaccaccccagttgctccccccgctggcgagatgcggggcggagcgggagcccttccggtgccaggcggcctcgcgctcggggtggtgctgcttctagttctcgccgtgctgccgtcccgggcggccggggtgaacgtgacggccgcgctcgcggctttccccagcttcgccgacttcgcgcggcttctggagtcgagcccggtggccggggagctggcggcgcggtcgtcgctgacgctgctggccgtgccgaacaacaacctgccgcgctcgccctcggcgttcgcggcggcctccggcgccgacatcgccgatgtgctgcggtaccacgtcctgcttgagtacctctccccttctgacctcgcgcgcctccccgcctccgggaagctcgtgacgacgctgttccagaccaccgggcgcgcgccctccgatctcggcgccgtcaacctcaccgtcgggggaaactccaccgtcgtggtccggtcgccggcgcctttcccggggtcgagcgccactgtcctcggcgccgtcaccgctgtgccttacaacctcagcgtgctcgcggtgggtggcctcatcgtcccctccgggctcgacgtcgcggcctccgacagccgcccggccggtggcgtcaacatcacccacgtcctcgcggacgcgcgggggttcaacgttgctgcctccatgctggaggcatcgggcgtcgcggacgagttcacggcagacgagcgcggcgccggcatcaccgtcttcgtgcccaccgacgacgccttcgccgacctccccgccaccgaccgcctccagtccctccccgcagatcgcaaggccaccgtgcttcgcttccacgtgctgcactcgtactatccgctcggctccctcgagtccatcgtgaaccccgtgcagcccacgctcgccaccgagcgcttcgaggccggccagttcacgctaaacatcacacgcgtcaatggctccgtcgccatcgacaccggcatcgtgcaggcttcgatcacccgcacggtgttcgaccaaaatcccgttgcggtgtttgccgtctcgaaggttctactgcccaaggaaatgttcggtcggggcggtgctgatagcgacgtcatggcgccgccgccggacgcgatggcgccagatgctgccgagaacgtgcggacgccgccgacgagactgtcgtcacctccagcactgcggggtggcgctgatagtgagtcgtcatcagcattgtcaacggcaagggctgtcaattggtggtgtatacggttggtgctcctaaatctgcatctcttactactacctctggtatgagatccggatgttacccattgctcgcttcattttgctcaatttttgttcttctgttactattttccccattttagaatgtgtactacgggaatgtgatgggtagagaattttataggggcaaaagcagtagcaatttgtctagtttctttattagttttaacgaaataatatcatgtgtagagagacctatgaaacctacttgttccaaaacgaacagcagcatgttcatagttgttctaatcaggtcagtttgtgtttgaactgaagtccaattggggctagcattactggggaattggtgtgaggaactgaggattactggggaatcgatttgtgtgtcttttgtattaaggtaaggtgcagaagaatttgaagacatgcatttgcctggtattttgtttatcaaggacctgaagtcttggagtcagggttctggagattgatagataggtggtaagcgtgaggaatgagctggccagcttggaggtggcctggttgtctacccctgtttttgattctcactcctctttcctgctaatgacgcggactctagttgcgcttgctgttactattccctgaagacaaattgaacacatgtccaccctttagctgattggtcaggattttccaccgttaaatttctgttgaggacataaaccaaccatttagggtggcatatgctcaattatccctttttttatctaaccatatagggtggcctaccacgtactccttgctgatcatttggctagtttcgtagcgtgtgaactgaaatctgataagttggtttgcagttaaattaaatagcttatgccccagctccaaaagcttcctatatgaactttagcagccctaagatctgaagagaagaagtttagcagcattgtataccaggttgcgaatttactgataggtaggtgttctgattcttgtgactacctatcaggtattgctcatttcatgcaagttaggtagttgtatattgttgtgtttggtagagatttgagggaatttaaaccatcccaataaagagtttgaaattctaggtgctattgtcatgcattgctagtctaacgtctaaacatatccaaatagtctgtcagttatccaaacatgtcgaccaaaaacatgagttgttgtaacttgtatatgcctctggtagctaccgtttatatgtgcggctattcctaacattctgtggtgtttcatgttcataatggctggtgggtttttggggagggaccactgtgcatgaaacttttgtatgtagtttcactagagtccatgaaagtggacctattgaggttgcccatctttattcgattagtttctggacccgtttggtcatgtgccagctcatgcgtactttacatgagccatgggacccatcaagttcttttctgaataatatccatgagatgagccatggttgaaatgtcaaactttctaaataatgacgtgcacattttctgctttctttgtaaactagcgtcttggaaattcagcattaatactggatgcgatgtgtttgtcatagacttgtaactattcattaaacttgtaactacttcagtaaaagtgtatcctctgtaccactgaagagtgaagaaatgaatgcagaatagaaaaccctgcctatctgaaatatactgttcagattgcggagaatatttatactaaaaaaagttcaatatttatcatatgtctcgagtgtcttcatgtcatgaaaacaaatgaggtgatatttatgaaagatcaaagtaatgagtcgtttggaacacctaggttcttgggcaagataagatttagcaataatgcatataggtatgttggattagtggcaaattactggtttagtttattgttgcggacttgtccatctatagcctacagtgaaatcaagaggcatttgtatctatgttttcaatttcacattctgaagtcttgtcagaaaaataccggcatatgctgtagaaaacagtgtaacaccaatatcttgttctttgttgtgcgctgcagcatgcacttgtcacctattgtgctacagtttttttttttttggggggggggggatgggtacagtcttgagactgaatttcagcaataatgaataaatggaaggtgcccatctattttaatattttttaccttttgatttttgttctcatgctccttgtctgaagcttcatcttttctgtaagatcatttaacctatctctgtaacttaaatcctagagtaggaatatgcaatgttcttttctgtaagttcttgtaacctattcctgcaaatgagcttaatggagttctgaacttcttatacatactccatcaaaggattgtgcatctaaaattcctgattacctgtacttttatcaacaaaaagaaaaaaaaaggaagaagatatgcatagttattatgaggttctttcaatctgcaaattttgatcaataatacaagggtagctgacataagtgttcttagtgg

SEQ ID NO: 280 - protein, 274 aa, Oryza sativa
MMESKAAMMVTILLCCSSISPAFAQKHKGPPAAAAVSLPPSPAPSPAAPRHVDLADLLSVAGPFHTFLDLLEKTDVLRTFQSQANGSKDGITVFVPKDAAFASLARSATANLTSDQLKSLALYHALPRYYSLAEFNRLGGAASPVPTLAGGEYTVNVTDDMGTVHVGSMWSNPKISSSVYSTRPVAVYEVDRVLLPMQIFRTDPPMAPSPAPAPDAKPASDAASPLPGKSSSAKAKADEKKSSSSPPSSRRGAGIAGYFLALAASASAGLLLLC

SEQ ID NO: 281 - DNA, 1754 bp, Oryza sativa
tgccttacatttacatacatacccctcctctcaggctctcactcgcgctgcatgccacactgcttcttcttcttctctctctctagctagctagctagcttctctgtaggctgtagctgcggtggcaatggcggcggcgaggttgtgggtggttgcggtggcggtggcggtggcggtggcagtgatggcggcggcggtggaggggaagagctacaacatcacgaagatcctggcggcgcacccggagttctccaagttcaacgagatgctgagcaagacgaggctggcgtacgacataaaccggcggcagacgatcacggtgctggcggtggacaactcggcgatggcgtcgctggaccacttcaccctccccaccatccgccacatcctctccctccacatcctcgtcgactactacggctccaagaagctccacgccctctcccatggcgccaccgcctcctcctccatgttccaggcgacggggtcggcgccggggacgacggggtacgtgaacatcacgtcgcacaagggcgggaagatcgacttcatctcggaggacgcggacgagagcgcgaagccgtcgaggtacgtgaagtcggtgaaggagatcccctacgacatctccgtgctccaggtgagctccgtgctgtcctcctccgaggccgaggcgcccgtcccgccgccggcgccggtgaacctcaccgagctcctctccaagaagtactgcaagtccttcgccggcctcctcgccgccaacgccgacgtcttccgcgccgtcaacgagaccaaggacaacggcctcaccctcttctgccccgtcgacgccgccgtcgccgccttcatgccctcctacaagaacctcaccgccaaggccaagaccgccatcctcctctaccacgccgtcccggactacttctcgctgcagctcctcaagtccaacaatggcatggtcaccacgctcgccaccgccagcgagtccaagaaggactacagctacgacgtccagaataagggcgagaccgtcacgctcgacaccagggtcgtcaactccgccgtcaccgccaccgtcggcgacgccgagccgctcgccgtctacgccgtcaccaagttcctcaagcccaaggagctctacaaggtcgtcgaggcccccgcgcccgcgcccgagccgtccaagaagcacaagtcggcggccgacgacagcagcgacgactcgtcggacgattccggcgacgtcaaagcccacaagggcgccgccgctccggcgccgctcgcccggtgggtgaccgccgccgcggccgccgccgtagcagcattgatgctaatggcttgatgcatgagtcagtcaatctacactctacagagcagagtgtgtcgaatttgttttttttttttcctttttggtatggctggtcaattacaaataagaaacatagatgtgtgaatgatttgtagttctttgagttttttctttctttctgtggtggtttgatgtaattactttgtaattaatatagttgtccataatccacggaaaaagctaagaatgatttcatcataattaagaacagcgtcaaatttagttaaaaaaaagattcttttttctattctttgaagaggaaacagaacggttggaaccacccttttattatacttatcttagggtttccccctctggataagctatatagaattatgtatttctttgtttcttcgtgacaacattagttgcgaaaactttatatatatatata

SEQ ID NO: 282 - protein, 479 aa, Oryza sativa
MGVSALLLLLLAAAATAAPPEQPALSATPSSAAAANNSSGGGGGAASNGVNSNSVLVALLDSHYTELAELVEKALLLQTLEDAVGKGNVTIFAPRNEALERDLDPEFRRFLLEPRNLRSLQRLLLFHVLPARLHASDSSSPDFPSSHPTLSGERVDLSASPMRVGAAAVTRPDAVVRPDGVIHGIERLLVPRSVQEDFNRRRSLAAISAVLPTGAPEVDPRTHRLKKPAPPVPPGAPPVLPIWDAMAPGPSIAPAPAPGPGSGKHHFDGHSQVKDFIQTLLLYGGYNELADILVNLTSLATEMGRLVSEGYVLTVLAPNDEAMARLTTDQLSEPGSPENILYYHMIPEYQTEESMYNAVRRFGKVRYDTLRLPNKVTAREADGSVKFGHGEGSAYLFDPDIYTDGRISVQGIDAVLFPPKDTATGGEGSGSGSSGAAPARKAPAVTAHSKSKLRRGKLLEGACQVMGFLGRRSRFASCQ

SEQ ID NO: 283 - DNA, 1279 bp, Oryza sativa
cctgaaaacagtagtgagccctctctgtcctctactcaatcctcatcaacagctgccacccatgatttcattatctttttactttccccacattttatatagccactctcctccttaactcccctcctactctcctccattccttcactgccttcacttccctgctcagctcagcagctcagggacttcgaggatgatggaatccaaagcagccatgatggtgaccatcctgctctgctgctcctccatctcaccggcgttcgcgcagaagcacaagggtccgcccgccgcggcggccgtgagcctcccgccgtcgccggcgccgtccccggcggcgccgcgccacgtggacctcgccgacctcctgagcgtggcgggtccgttccacacgttcctcgacctcctggagaagacggacgtgctcaggacgttccagagccaggcgaacggcagcaaggacgggatcacggtgttcgtccccaaggacgcggcgttcgcgtcgctggcgaggtcggcgacggcgaacctcacctccgaccagctcaagtcgctggcgctgtaccacgcgctgccgaggtactactccctcgccgagttcaacaggctgggcggcgcggccagcccggtgcccacgctcgccggcggcgagtacacggtcaacgtcaccgacgacatgggcaccgtccatgtcgggtcgatgtggtccaaccccaagatcagcagcagcgtctactccacccgccccgtcgccgtctacgaggtggacagggtgctcctcccgatgcagatcttcaggaccgacccgcccatggcgccgtcgccggcgccggcgccggacgccaagccggcctccgacgccgccagcccgctccccgggaagtcgtcgagcgccaaggcgaaggcggacgagaagaagagctcgtcgtcgccgccgtcgtcgcgccgcggcgccggcattgccggctacttcttggctcttgctgcatctgcctcagctggattgctgctcctgtgttgatgctaagaaacttttctaattcttttttttttttgcatggattgttggttgctggataattttattctttggacatagtaggggcattgtgttaggattaagttttatgggagtatttccgtcatatgcttgtatgattagtcgatgattacttgtttatccgatgcatgttgcgaattgcacaaggtattttatagggttaatttgatccatgccactctaaatatggcaaataaaaaaataccactactattcgcgtta

SEQ ID NO: 284 - protein, 271 aa, Oryza sativa
MRHLRLAAALLLVVLFPLAVSAADGKAAAAPAKAKAPAAPPPAPPNITASMAKGGCKAFAALVAASPDALSTFQSAADGGVTAFCPTDDAMRAFMPTYKNLTADGKASLLLFHAVPVYYSLRSLKSNNGVMNTLATDGSAKNFNFTVQNEGDKVTIKTDASDGVARIKDTVYDKDPIAIYAVDTVLEPVELFEPAESPAPAPAPVADAPKASKSKKASHRHVADAPGPAGDDAPPADQRKSSKKNDAAAGASCLRWLAALPVAVAVAAALA

SEQ ID NO: 285 - DNA, 1351 bp, Oryza sativa
taaaccccagccctaacaccgcacagtacagtagtagctatacagaaagcaaattaattaagcatccaaaatggcttcctccccaagcacagtatttcttgtactgtccctaaccctagccaccgtctccgtcgtcgtcgtctccggcgccggcgaagcgccaagcccggcaccgacggggcccctcaacctgacggagatcctgacgaaggccgggcactacaacaccttcgtccggctgctcaaggacacggaggtgacgtcgcaggtgagcagcctgctgaacaacgaccggaacggcgacgggctgacggtgctggcgccgacggacgccgcgttcgggcggctccggccggggacgctcaaccagatggacgcgcaggcgcaggcggagctggtgctgtaccacgtcctccccaggtactacggcttcgtcacgttcgagaccaccaccaacccggtgcgcacccaggcctccggccagcgcggcgtctgcaccgtcaacgtcaccaccgccggcgaggacagggtgcgcgtctcgtccggggtggtggaggccgagctcgggaggccgctccgcgacggccacccgctcgccgtgtactcgctcgacgccgtcctcctcccgcccgacatgttcggccccggcgccaagaaggactacggcgccgccgacgcgcccgcggcggcggggaagcacgggaagccgcagaccgcgtcgtcgtcgtcggtggcggcggcgcctgacgaagcgccgtcgaaggaggtggacgccacggcgacggcggccgccggcaggatggcgccggcgggatgggcggcggcgtttgcaggggtcgtgaccgcggtggtcgccgtgagcctgctctcgtattgatgagcaggcatgcatgcgatgcaggcgatgcacatatcgttaatttacattgggtttttgctcgatatatgctacgcacaagcacgctccatttcgctctgttaatatgttgtgtacaaacaacattgcattttgtttatcagatgtataccttgtgaatgcatgttttacattccaagttactgcaccgatgtagttttataatttacatatacgctcaactttaattcgtacacactgtgtgtcatctgagtcaaatagtactagtacttgttttgtgcgtcagtacctcactggggaccacctatacatttgtcgataaattttctactaaaaatttgacagatgtaattatagtacaatcatagtgtaattacactgtaacttgtatgtaattacactgtaacttacatataactacagtgtaacttgtatgtaagtttcacgtaattttgaatagttagatctattaca

SEQ ID NO: 286 - protein, 431 aa, Oryza sativa
MAATDRRLLFLLAASLAVAAVSSHNITDILDGYPEYSLYNSYLSQTKVCDEINSRSTVTCLVLTNGAMSSLVSNLSLADIKNALRLLTLLDYYDTKKLHSLSDGSELTTTLYQTTGDASGNMGHVNITNLRGGKVGFASAAPGSKFQATYTKSVKQEPYNLSVLEVSDPITFPGLFDSPSAASTNLTALLEKAGCKQFARLIVSSGVMKMYQAAMDKALTLFAPNDDAFQAKGLPDLSKLTSAELVTLLQYHALPQYAPKASLKTIKGHIQTLASTGAGKYDLSVVTKGDDVSMDTGMDKSRVASTVLDDTPTVIHTVDSVLLPPELFGGAPSPAPAPGPASDVPAASPAPEGSSPAPSPKAAGKKKKKGKSPSHSPPAPPADTPDMSPADAPAGEEAADKAEKKNGATAAATSVAATVASAAALLAASFL

SEQ ID NO: 287 - DNA, 1076 bp, Oryza sativa
accacccatggcgtccaggctctccttgctcctgctcctcgccctcgtcctcccggcttccggcgatgacgccgcggcggcggaggcggcgccgccgccggcgccggcgggcggcgcgtcgttcaacgtgacggagatcctcggccggttcccggagttcgggctgttcagctacctgatcagcaagacgcacgtcgaccgcgacatcaacagccgcaacacggtgaccgtgctggtgccggacaactccgccgtggactggctcctccgccgcagcgccaggctgccgcgggcggcgctcgtcgagctcctctccgtccacgtcgtgctcgactacttcgacgccgcgaagatcgccgcgctgccgccggggaagcccaccgtgtccaccaccctgttccagaccaccgggaacgcgcgccgccgcaccgggttcctcgccatcaccccgacggccaagggcggcgccgtcttcgcctccgccgcgcccggcgcgctggtgaacgccacgctcaagagggtggtcgccgccgtgccgtacaacatctccgtgctccagatcagcaacttcgtcgtgccgccgggcgtcctcacgaggccacggccggggccggggccgctgccgctgccgtccccgccgttgccgaggatgaagccgatggcgatcgcgccgaccccggcgccggtgccggccccgacaaagatggtgccgatcccgccgagtttgccgctgacggatccggccgatgaggacggcgacgaggcgccggccgccgcgccggcgccgtcgcatggcaacgcggtgaaggtgatgagttggtggtcaggccttggcgtgctcgtggggacgatggcatgcgtgttcggttatttgtaggttaactaattaatctgctctattttaccggttacgttatataattaatctacaggtgcatcctacgtttttagcgcatatgatcgtagtagttgaatttgaagaaacagttctctttttttttgtcccattttttgttgttgtggagtagagacttgtaatcgccggagaaaataattagcaaagcaagagttaaata

SEQ ID NO: 288 - protein, 273 aa, Oryza sativa
MRRLRLAAAAAAPHGVLLLLLILLPLVAAAGPAAAKAPAAPPAPPNVTTAMAKGGCKAFADLIAASPDASSTYQSAAGGGITVFCPTDDAVRAFLPRYKNLTADGKAELLLFHAVPVYYSRGSLKSNNGVMNTLATDGAAKNYNFTVQNEGDAVTIKTAASGDAARVKSTVVDADPVAIFTVDAVIEPVELFKPAPSPTPAPSPAPAADAPKASKPAHHPAPVVADAPGPAATDSPPADQKKEAKKSAAAGAPPCVRWFAAALAAVAMASTLA

SEQ ID NO: 289 - DNA, 1009 bp, Oryza sativa
gtcttagctaactacttcacactagtgagaacagagctgagctgagagcaatggcgatggtggcgaggaggttcttggtggcggcggcggctgtgtgcctggcgctggcggcggtgccggcggcgatggggcaggcggcggcgccggcgccgaagggggcggcggcggcggcgctgaacgtgacggcgatcctggagaagggcgggtcgtacacgacgttcatccggctgatgaagagcacgcagcaggacacgcagctgaacagccagctgaacggcacgtccaccggcttcaccgtgttcgcccccaccgacggcgcgttcagcagcctcaagcccggcacgctcaactccctgtcggcgcaggaccaggtgtcgctggtgcaggcgcacatcgtccccaagttctactccatggacgccttcgacacggcgagcaacccggtgcgcacccaggcgtccggcggcgacggtccctacacgctcaacatcaccgccacctccaccaaccaggtcaacgtctccaccggcgtcgtcgacaccacgctcggcaccgcgctgcgcgccgaccagccgctcgccgtttactccgtcgacaaggtgctcctcccgtacgcgctgttcggccccaagccgccgccgtccccgccgccggcgcccagcaagaagccggccaagggggacaccagcgcgtccgcggaggcgcccgctggctccgccgaccaccctgccggcgccgcccccgccgccgccagggccgccgggtggggcgtggctgccttgctggccgccgcttgcctcttgtaagatgagaaattcgtgtcggtgcatatgagatcagaggctactactggctgagtgcatgatgcatttcaagagtagttcttgctgcaacttaaactactcctcttcctctccttattcttctctctctccttgtgattgaacaaatttatccagtggttttgaagagtggatgacgaaatgcagtcgaaatgtttttctgtaca

SEQ ID NO: 290 - protein, 269 aa, Oryza sativa
MQAMQRLVLCLVVSMAIAASAQGPTAAPAAPAPATPAAPATPAAPAPASTKTTNITGVLAKAGQFNTLIRLMRSTGAAEQIDNQLNSSRNGLTVFAPTDNAFTSLPSGTLNSLSDQQKNSLVQYHVLSTLIPMSQFDTVSNPLRTQAGSNSPGQYPLNVTAEGQQVNISTGVVNATVGNALYTGDNLVVYQVDKVLLPMAIYSTPAPAPAPLSPATKKKGKTPATSVADAPEAADATPDATTPSLAAARVTAGAGVGVVLALASVWLGL

SEQ ID NO: 291 - DNA, 2045 bp, Oryza sativa
acaatcgcctcacctctctccccctctcccaagtctccatctctctctcctcgaataaacccccaccaccccacctccatttttactcctcccacgagacagcacaaacccaatcccatccaccaaccacctcgccgccgtcgccgccgccgcagccatgggcgtctccgccctgctgctcctcctcctcgccgcggccgccaccgccgcgccgccggagcagcccgcattgtccgctactccctcctccgccgccgccgccaacaacagcagcggtggtggtggtggtgcggcgagcaacggggtgaactcgaactcggtgctggtggcgctgctggactcgcactacacggagctggccgagctggtggagaaggcgctgctgctgcagacgctggaggacgccgtcgggaaggggaacgtcaccatcttcgcgccgcggaacgaggcgctcgagcgcgacctcgacccggagtttcgccgcttcctcctcgagccccgcaacctccgctcgctgcagcggctcctcctcttccacgtcctccccgcccgcctccacgcctccgactcctcctcccccgacttcccctcctcccaccccaccctctccggcgagcgcgtcgacctctccgcctcgccgatgcgggtcggcgccgcggcggtcacgcggcccgacgcggtggtgcgccccgacggcgtcatccacgggatcgagcggctgctggtcccgcgctccgtgcaggaggatttcaaccgccgccgcagcctcgccgcgatctcggcggtgctcccgacgggggcgcccgaggtggatccgaggacgcaccgcctcaagaagcccgcgccgcccgtcccccccggcgcgccgccggtgctgccgatctgggacgcgatggcgccgggcccatccatcgcgccggcccccgcgccggggcccgggtccgggaaacaccacttcgacgggcacagccaggtgaaggacttcatccagacgctcctcctctacggcggctacaacgagctcgccgacatcctcgtcaacctcacctcgctcgccaccgagatgggccgcctcgtctccgaggggtacgtgctcaccgtgctggcgcccaacgacgaggccatggcgcggctcaccaccgaccagctcagcgagccggggtcgccggagaacatcctctactaccacatgatcccggagtaccagacggaggagagcatgtacaacgcggtgcgccgcttcgggaaggtgaggtacgacacgctgcggctgcccaacaaggtgacggcgagggaggccgacgggtcggtcaagttcggccatggcgagggctccgcctacctgttcgacccggacatctacaccgacgggaggatctccgtgcagggcatcgacgccgtgctcttccctcccaaggacaccgccaccggcggcgaaggctcaggctccggctcgtcgggcgccgctcccgccaggaaggcccccgccgtcaccgcccactccaagtccaagctccgacgagggaagttgttggaaggggcatgccaagtgatgggcttcctaggccgaagatcgcgattcgcgagctgccaatagactacgacaatggcttgatggacaaatatgtatatctgccactgctttttgctcaactcatgacgctgaaacatgaaccgaaatgaaggctacagatgatgattggttggatggatgaatggacgaacaaattgatgatggttttacataagcttaattaagaggaagaaataaggtgtcatgagaacgagttgagagagacggatggcagacattctggttggttgttggaggtggaaaaaaaaaaggatggaaatttgtttatactggtcagtgaagatcaaacaccgatgtatagcaattaaacttttctatttttttatttgttttattttattttgttgatgatgatgttcagcgctttttgataatgaggaatgccaaaaacaaaaattgcagtgttcatggacctttatcttcgtctcctttctccatgtttgaccactga

SEQ ID NO: 292 - protein, 277 aa, Oryza sativa
MRLAVATFLAIALSLSLLLAGALARPPPAPVRTDAGGGAAPAPQDKGGNLTDVLNVAGPFSTFLMYLRQTNLVAVFEHQAYRTHQGITIFVPVDMAFAAIEPSVLAGLSRNQLKHLLMYHSLAKHYTLAEFDGLSQSNPVKTLAGGRYAVNVTYDGGVVHVMSRWSSARVVGSVYESAAMAVYELDTVLLPDALFHAHPPVAATPPVPALPSPPPHADHPPPDDDDGDIDDYVPAPPPDPAAGKGGAKRSASGPAVVAHKAASYGAAAAMTLLVSCL

SEQ ID NO: 293 - DNA, 1943 bp, Oryza sativa
gtggttatcgtgaacaatcaggggctttgttacaaacaccgtaggtgcccctgcctccctgccagatctcgttgcctgccatagtgccatgccactactactacaactacaacaactacatagagccaggcaggccaagctgagctgcggcgccccaccaccatacctctccgactccgcgcgagcatcgccaccagcccaccaccgcaccagtagtagtgagtgctcagtgcgttccactccactccgagctaagcagcgaacagctcgccgccgacgctctctctctctctgtagatatggagctgctgctgcggcggctggcggtggtggtggcggtggtggcgttgacggcggcgacggcggcggaggggtacaacatcaccaagatcctcggggaccacccggagtactcgcagttcaacaagctgctgacagagacgcggctggccggcgacatcaaccgccgccgcaccatcacggtgctggtggtggccaacggcgacatgggcgcgctctccggcggccactacaccctccccacgctccgccacatcctcgagatgcacatcctcgtcgactactacggcgccaagaagctccaccagctcgcccgcggcgacaccgcctcctcctccatgttccaggagtccgggtcggcccccggcacgacggggtacgtgaacatcacgcagcaccgcggcgggcgcgtgtcgttcacggcggaggacgcggcggacagcgcgacgccgtcgagcttcgtcaagtccgtgaaggagatcccctacgacctcgccgtgctccagatcagcaagccgctgtcctcccctgaggcggaggcgcccgtggccccgccggcgccggtgaacctcaccgagctcctgtccaagaagtactgcaagaacttcgccggcctcctcgcctcgaacgccgacgtgtacagcaacatcaacgcgaccaaggacaacgggctcacgctcttctgccccgtggacgccgccgtcgacgccttcctgcccaagtacaagaacctgacggccaaggggaaggcggccatcctcctctaccacgccgtgccggactactactcgctccagctgctcaagtccaacagcggcaaggtcagcacgctcgccaccgccagcgtcgccaagaaggactacagctacgacgtctccaacgaccgcgacagcgtcctgctcgacaccaaggtcaactcggcctccgtcaccgccaccgtcaaggacgccgacccgctcgccgtctacgccatctccaagttcctgcagcccaaggagctcttcaaggtcaccgaggacctggcaccggcgcccgcgccggagggccccaagaagaagaccaagaagaagaagccgtccaccacctccgccgctgccgccccctccgacgactcctccgccgccgactcgcccgacggcacccccgcggacgacgtcgcggacaaggccgccgccgcgccgtccgtgctcgccaggtgggttaccgccgccgccacggtcgccgcggcgttggcgttggcagcttgaggtggtggtttgagcttagtgcattttgtgttgagttcttcagctcctctccctcttcttcttttgtccaattcgtgtccctcgttggtgcaaaaaataagaagggctatttatttttatatttatcgctgcagttcccagggaaaaaattgaaacaaaaaagaagaaacttaattagaggtgtgattctagagtttttcattttcttttgtttattgggtttgtggtgatcattttgtaatgatagtggtcaatgagattggacagtgtgtttatatatgattaaagacatcatcaagtttagagttgtaccccatatcctttttttgcttttctttttaagctggtcatgatgaactttctcgatcacgtgttttacataatcgactttgtgct

SEQ ID NO: 294 - protein, 441 aa, Oryza sativa
MRGRQIPPPTAAASSRVVVAAVAALLLAAALQPLPVASGVDVAAVLAAFPDLAGFARLLASSPVARELAGRSSLTLLAVPNGNLPQSPSAYAAASGADLADVLRYHVLLEYLAPADLRRLPASGKLVTTLFQTTGRAPADLGAVNVTAAGPSLAVVRSPAPFPGSNATVLGAITAVPYNLSVLAVDGLIVPSGFDLAASESRPPAAVNITKVLADARAFNVAASMLEASGVADEFEADERGAGITVFAPTDDAFAGLPAGDRLQSLPAERKAVVLRFHVLHSYYPLGSLESIVNPVQPTLATEFTQAGRFTLNITRANGSVAIDTGVVQATITRTVFDQNPVAVFAVSKVLLPKEMFSRSDSAIVAVASAPPPAALPAESPESAPTKLSSPPALRDTAGNANHTAAAAAVAAAAATTKPTIGRWCIALLYLLLLPLLLPLV

SEQ ID NO: 295 - DNA, 1052 bp, Oryza sativa
acacacactacacacactacgcttctacgctacacaccactactctcacaacaatggcgaggagcgtagccgtggtggtgttgctggcgatggcggcggtggcggcggcgcaggcgccgggtcccgctgcgacgccggcggcgggcgccacggggccgccgaacgtgacggcggtcctggagaagggagggcagtacacgacgttcatccggctgatgaaggagacgcagcaggacacgcagctgaacagccagctgaacaactccttcaacggcaacggctacaccgtgttcgcgcctaccgacaacgccttcaacaacctcaagccgggcaccctcaacagcctgacgcagcagcagcaggtggcgctcgtccagggccacgtcctcccgcagttctactccatggactccttccagacggccagcaaccccgtccgcacccaggcgtccggcaccgacggcccctacaccctcaacatcacctccaccaccaacaacaacgtcaacgtctccaccggcgtcgtcgaggtcaccgtcaccaacgcgctcagcgcggtcaagccgctcgccgtctactccgtcgacaaggtgctcctccccttcgagctcttcggcgtcaaggcccccgccgccgcgcccaccgcgtcgaccgccaagcccaagaagggtggctccacggaggccgcctccggccccgccggcgcggaggacgccgagcccacgggcgccgccagcgccagggccgtcggctggggcgtcgccgggctcgccgccgttgttggctgcctcttgtaagacggtgtacggacacgatggtcgaggaagctagccatgtgcatgcatttcttttcttttctttttttttcctttttttccttttctttcattcttcctctctccatgtttaaatttatttgattttgactagtttgttctttacattattcttgttcttggtggtttgtaatattgggctgtgtgattggagttttctgtctgaggccgggatgttaataatgcattagtacattttgagtcatttcacttgtt

SEQ ID NO: 296 - protein, 267 aa, Oryza sativa
MASHTTLILLLPLLAAAAVAAADVAPAPAPPAAQTINLTGILEKGGQYNTLLRLLNATRVGEQLGSQLKTTYDGLTFFAPTDAAFAALRPGTLNGLSDQEQVQLVLYHVLPRYYTLATFQTASNPLRTQATGPAGVYTVNVTTTTGQSLVNVSTGVAAVPLGTTLSADFPLAVYSVDGVLLPEQMFGKAKAPAPAAAPASAAGKGANKEHKKGGAMPKNEVAATAPTAGAGGEDSDDSATTNAVAVAGAAGVVWTAALVGIANLVIA

SEQ ID NO: 297 - DNA, 1252 bp, Oryza sativa
cctcccactctgttttacactcatcatcagtcatcactacacggctcccacttccctcactcccacgcagacacatcccacacgctaggcacaatgcgccacctccgcctcgccgccgcgctcctcctcgtcgtcctcttccccctcgccgtctccgccgccgacggcaaggcggcggcggcgccggcgaaggcgaaggcgcccgcggcgcccccgccagccccgccgaacatcacggcgtcgatggcgaagggcggctgcaaggcgttcgcggcgctggtggcggcctcgcccgacgcgctgtccacgttccagtcggccgccgacggcggcgtgacggcgttctgccccaccgacgacgccatgagggcgttcatgcccacgtacaagaacctcaccgccgacggcaaggcgtcgctgctgctcttccacgccgtcccggtctactactcgctgcggagcctcaagtccaacaacggcgtcatgaacaccctcgccaccgacggctccgccaagaacttcaacttcacggtgcagaacgagggcgacaaggtgaccatcaagacggacgcctccgacggcgtcgcgcggatcaaggacacggtgtacgacaaggaccccatcgccatctacgcggtggacacggtgctcgagccggtggagctcttcgagcccgccgagtccccggcgccggcgcccgccccggtcgccgacgcgcccaaggcctccaagtccaagaaggcgtcccaccggcacgtggcggacgcgcccgggccggccggcgacgacgcgccgcccgccgaccagaggaagagctccaagaagaacgacgccgccgccggcgcctcgtgcctgcggtggctcgccgccctgcccgtcgccgtcgccgtggccgccgccttggcttagcggcgctcacatttcgaggtggatctgcaggagagggtggcggcggcgcgcggagtgtcggtgggcggtgtcagtgcgtgttctagtggcgtgtgcgtgtgagacttgtgtttttttttcttggatggaaactgcataaaaatttgtttgtttttcttctttgttctttcttactgctccattgatgttgttagcatgaaaaagaaaaatcaaatattgatgtggcatggatattcgaacagtttgatcagaatttgggaaactcaaatatcccaaatgttcatgtacattttcacagctactactactgaattactacataatgtagggattatacttgtca

SEQ ID NO: 298 - protein, 263 aa, Oryza sativa
MELKSAVLAVAALCLALALLLPRVALSQRLATADAPAPAPAPRHVDLAELLSLAGPYGTFLGYLTKTGVITTFQSQANDTAAGAPGVTVFAPEDSAFAAVGGGAALSNLTADQLRTLMLCHGVPRYHPLSSFSALAASGPAPTFAGGQQYAVNVTDAAGTVRIQSGWATAKLVSSVYSTSPVAVYALNRVLLPEQIFPTAPKVAPVPAPAPAPVHGDKANDGAPGAGELGASDVKSSSCRVGAGRLLAILAVMVSSFSDDIVV

SEQ ID NO: 299 - DNA, 1066 bp, Oryza sativa
attgcagagagctcgcaaccacaggctaatttaattagcaccagaaatatggcttcttccaagatgacgctgctccccgtcctcctcctcctcgccgcggcctcgccggcggcgctgggcgccttcgacgtgaaccagatgctcgccgacaagtcccagtacgggtcgttcctgaagttgctgacgcagacgaaggtcgcggaggagacgaaccggctcaagtcggcgtcgctgctggtcctccaagacaaggccatgaagccgatcacgtcgctccccgccgacaagcagcggatggccatggccaaccacgtcctcctcaagtacttcgaccccatccagctgggcgagatgaaggaccgcaccgccatgctccccacgctgctgtccaacaccgacaagaagctcggcgtcgtcaactacaccaaggccagcgacgggcagatgtacctgggcgcccccggcgcggcctgcgtcgccaagctcgtcaaggtcgtcgccgcgcgcccctacgccatctccatcatggaggtcagcgaggccatcctgccgcccgcgctcggtggcagcggcggccccggccggcgcgccaagggcggcaagggaaaggtcaagccgaagtccagcgacgccgacgaagccgcggccaagcccgccacggagccaaaggcaaccgatgtccctaagtaagccggtggcaaggtcgacgccgatcgacgcgctcgtccgtccacgtacaagtttggaattggatagcgcaataaccacgcacggctaggcgtaatgtgtgacgacacgtacggcgcattaccagtctagtataccatcacctttgacctgtactgctaattttcagtttaatttgtattcgatcaagtacgtgaaattgggtcgagttcgatcgatcggttgtttcatacgaaccgagttttgtactgctactaattaatgtaatggcttatggctaatgcaaatatttgcatgtatacggctgatcgatgtgcatatactgcacattatgttcaagagaaaaccacaaatcgatcgtccgattccttaaataaaa

SEQ ID NO: 300 - protein, 401 aa, Oryza sativa
MAAAAQRLVAAVVVLVACLALPAARGLNITAMLNGYPDYKMFNKYLSETKVCDEINARESITLLVLGDGPMSTLVLDADQSLAGIKNALRLHAILDYFDPKKIRGLPDADTMTDTLYQAGGDAAGKMGNVKISTLDTGKIAFASANPGGKYEATMVKAIKQMPYKLSIMEISAPIEFDGLFDTPSATNLTRLLEKAGCKRFASLITSTGVLKTFEDAMDKGLTLFAPNDDAFDAKGAPDVKKMPSADLVTLLKYHALPSYNPKPTLKTVSRAMRTLASTASGKYNITVDTRGDAVTLNTGVDKSRVAATVIDDTPVCVLTVDNLLMPVELFGDAPAAAPSPDDAAPAPSPSVADASPPAPPPADAPSKPADHKEMKASSAVALRSVVLGALAAAVCSFVLL

SEQ ID NO: 301 - DNA, 1683 bp, Oryza sativa
accaaagtccaacaggccaaaaacccacgcccagaaaaagctaaaaccccaacacggcgcacactactctccttcctctccccaccgtgtcacaccacaccacacaacaccaccaccgccgccatggccgccaccgaccgccgcctgctcttcctcctggccgcctccctcgccgtcgcggcggtgagctcccacaacatcacggacatcctcgacggctacccggagtactcgctgtacaacagctacctctcccagaccaaggtgtgcgacgagatcaacagccggagcacggtcacctgcctcgtgctcaccaacggcgccatgtcctccctcgtctccaacctctccctcgccgacatcaagaacgcgctccgcctcctcaccctcctcgactactacgacaccaagaagctgcactccctcagcgacggctccgagctcaccaccacgctgtaccagaccaccggcgacgcctccggtaacatgggccacgtcaacatcaccaacctgcgcggcggcaaggttgggttcgcctccgccgcgcccggctccaagttccaggccacctacaccaagtccgtcaagcaggagccgtacaacctctccgttcttgaggtctccgaccccatcaccttccccggcctcttcgactccccgtcggccgcgtcgaccaacctcaccgcgcttcttgagaaggccgggtgcaagcagttcgcgcggctcatcgtgtcgtccggggtgatgaagatgtaccaggcggccatggacaaggcgctgacgctgttcgcgcccaacgacgacgcgttccaggccaagggcctgccggatctgagcaagctgaccagcgccgagctggtgacgcttctgcagtaccacgccttgccgcagtacgcgcccaaggcgtcgctcaagaccatcaagggccacatccagaccctggcctccaccggagcgggtaagtacgacctctccgtcgtcactaagggcgacgacgtgtccatggacaccggcatggacaagtcccgcgtcgcgtccaccgtgctggacgacaccccgacggttatccacacggtggacagcgtgctgctgccgccagagctcttcggtggcgcaccttcccccgcgccggcgcccggaccggcaagcgatgtgccagccgcttctcccgcgccagaaggctcctcgccggcgccctcccccaaggcggcgggcaagaagaaaaagaagggcaagtcgccttcccattccccacccgcgcctccggccgacacgcctgacatgtcgcccgccgacgcgcccgcgggagaagaggctgcagacaaagccgagaagaagaacggcgccaccgcggcggccacgagcgttgcggccactgtggcctccgccgccgctctgctcgccgcgtcgttcttgtgagcgtcaggtgttcgacgttgagctctcgttgttcccccctgggcatgcatggtgtgatgcagtccggtgttcgcttctgagctcgtgggctccatggataatctcatcctgaagttgtgttcttctcttcctggttggtagtactcggtagttagataggatttgaatgattggatcctcaggtggagaacggtgattgtgatgcctattttgttagagctcggaaccatgttttgtttttctcttggatttgttcttgtgatt

SEQ ID NO: 302 - protein, 415 aa, Oryza sativa
MRGGAGALPVPGGLALGVVLLLVLAVLPSRAAGVNVTAALAAFPSFADFARLLESSPVAGELAARSSLTLLAVPNNNLPRSPSAFAAASGADIADVLRYHVLLEYLSPSDLARLPASGKLVTTLFQTTGRAPSDLGAVNLTVGGNSTVVVRSPAPFPGSSATVLGAVTAVPYNLSVLAVGGLIVPSGLDVAASDSRPAGGVNITHVLADARGFNVAASMLEASGVADEFTADERGAGITVFVPTDDAFADLPATDRLQSLPADRKATVLRFHVLHSYYPLGSLESIVNPVQPTLATERFEAGQFTLNITRVNGSVAIDTGIVQASITRTVFDQNPVAVFAVSKVLLPKEMFGRGGADSDVMAPPPDAMAPDAAENVRTPPTRLSSPPALRGGADSESSSALSTARAVNWWCIRPC

SEQ ID NO: 303 - DNA, 2062 bp, Oryza sativa
ctctctctctctctctctctctcttccgttggagtaaaaaaggaggggaaagtgagaaaaagaggagaaaagctcacaccacccacctcctccattactagtttacttctcttctcctcctttctcccccattcccccaattcattccttcgccgaaccaccagagtggtggagagtagctagcagagtagcagagcggtgggagcagcagcagccgtagccgcatccggagagattcgggcaggagaagccgccgcagcgatgggcgcgccggtgcgcggcgccctcgtcttcttgcttcttctcgccggcgcggccgcggagacggcgccggaggaacccacattgccctccgccgccgccgatggggcggctagtagcgggacaacatctggcgctggtgctggaacgggaatcaactcgaactcggtgctggtggcgctgctggactcgcattacacggagctggcggagctggtggagaaggccctgctgctccagacgctggaggacgccgtcggcaagcacaacgtcaccatcttcgcgccgcggaacgaggcgctggagcgtgacctcgacccggagttcaagcgcttcctgctcgagccgaggaacctcaagtcgctccagtcgctgctcctcttccacgtcctccccgcccgcctcccctccgggtcctggtccgccgtctcccaccccacgctctccggcgaggaggttgagctcgccgccgccgccaacgacggcgcgatgcgcgtcgcccacgccgccgtcacccgcccggacgccgtgctcaggccggacggtgtcatccacgggatcgagcgcctcctcgtgccgcgctctgtccaggaggacttcaaccgccgccgcagcctcgccgacatctccgccgtgctgccaactggcgcgcccgaggttgacccgaggacgcaccgcctcaagaagccggcgccgcccgtgccacccggcgcgcccccggtgcttccgatctgggacgccatggcccccggcccatccatcgcgccggcgcctgcccctggaccgggctccgggaagcaccacttcgacggccacagccaggtgaaggacttcatccagaccctcctcctgtacggcggctacaacgagctcgccgacatcctcgtcaacctcacctcgctcgccaccgagatgggccggctcgtctccgaggggtacgtgctcaccgtgctcgcgcccaacgacgaggccatggcgcgcctcaccaccgaccagctcagcgagcccggctcgccggagaacatcctgtactaccacatgatcccggagtaccagaccgaggagagcatgtacaacgcggtgcggcggttcggcaaggtgcgctacgacacgctgcggctgccgcacaaggtggtggcgcgcgaggccgacggctcagtcaagttcggccatggcgagggctcggcgtatctcttcgacccggacatctacacggatggcaggatcgcagtgcagggcattgacgccgtgctgttcccgccggatgacaccaagacggcgccggacacggcgccggtcaggagggcgcccgccgtcaccggcactcgcaagaagaacaaactccggagaggcaagttgttagaagcaacgtgccaaatggctggcatccttggtcagcgattgcgattcgcaagctgccagtagacggcgaaagattgatctcatgataccgaaacacgaactagaatgaggtgatggactgtgctggagccgtccacattaccatttgtttttttttatttttatttttgtttattattacgaataataaatcaggtggggaatgtaatctggtggctgttggtgtctgaaaaaaaaaaaggcaggaaaatgttcatacttgaagaccgagatcttctgtgtataggagcgtttttttttatatttttttccgtcattttttcttctttttctgttttgacagaatgccgagtaaacaattaaacatcacagcatccttggtgttaaagctagtagtaatcaattctgcatcttctatagatctaatcatttatgcgaa

SEQ ID NO: 304 - protein, 427 aa, Oryza sativa
MRGGAGALPVPGGLALGVVLLLVLAVLPSRAAGVNVTAALAAFPSFADFARLLESSPVAGELAARSSLTLLAVPNNNLPRSPSAFAAASGADIADVLRYHVLLEYLSPSDLARLPASGKLVTTLFQTTGRAPSDLGAVNLTVGGNSTVVVRSPAPFPGSSATVLGAVTAVPYNLSVLAVGGLIVPSGLDVAASDSRPAGGVNITHVLADARGFNVAASMLEASGVADEFTADERGAGITVFVPTDDAFADLPATDRLQSLPADRKATVLRFHVLHSYYPLGSLESIVNPVQPTLATERFEAGQFTLNITRVNGSVAIDTGIVQASITRTVFDQNPVAVFAVSKVLLPKEMFGRGGADSDVMAPPPDAMAPDAAENVRTPPTRLSSPPALRGGADSESSSALSTARAVNWWCIRLVLLNLHLLLLPLV

SEQ ID NO: 305 - DNA, 1158 bp, Oryza sativa
acctccggtaacctcaagctcgaaccaaaccatggcttgcaagaacgcctcctcctcggccatgccgctcctcctcgtcgccggcaccgtcgtcctcgcgctgctggcgtcaccggcggcggccttcaacatcaccaggatcctcggcgagttctccgacttctccaccttcaaccacctcctcacgcagacgaagctggcggacgagatcaaccggcggcagaccatcacggtgctcgcactcgacaacggcgccgcgggcggcgtctcctcgctcccttccgacgagcagcggaaggtgctctccgtccacgtcgtcctcgactactacgacaccgaaaagctcggcggcatgaagatgaagaaccgctccgccgtgctcaccaccctcttccagtcctccggccaggccaccgaccgcatgggcttcctcaactacaccaaacgctccgacggcatcatggtgttcggctccgccgagcccggcgcgcaggccacgtcccagatggtcaaggtcgtcgtcacccgcccctacaacatctccgtgctgcaggtcaactcccccatcgtgccgcccggcatcgcctccgtcagcaacagcaacaccggcgcgccaccgccccacccggccaagtccagcgcgccggcaccctcgccgtccaagtccaaggggaagaagtcggatgccccggcaccgggcccgtccgacgacgtcgacgacgacaccgccgccgacgcgccgggaccggcggtggatggccccacggcggacgggccggcggcggacggtcctgcggcggatggtccgactgaggcagacgcgccggcgcacgacaagggcgacgtcgcagacgcgccgtccgccgccggcagggcggtggccagcagcgcaggccttggcgtcgttgcacttgtggttctcatcttcccctcagtctcactctgatcaatgctaaaatggtggaggccgagaaatcggaagagtttataaatagaatgaccattaggaaacgatatagtcagggttcactctatcggttgagacgtttgtatcgggggtcaccgaaattccgaaatttcgaaaatttcggtccgaaatttggaaaatttcgagtaaaatttagttgaatttgaataaatattacccaaattcatgaa

SEQ ID NO: 306 - protein, 401 aa, Oryza sativa
MAAARLWVVAVAVAVAVAVMAAAVEGKSYNITKILAAHPEFSKFNEMLSKTRLAYDINRRQTITVLAVDNSAMASLDHFTLPTIRHILSLHILVDYYGSKKLHALSHGATASSSMFQATGSAPGTTGYVNITSHKGGKIDFISEDADESAKPSRYVKSVKEIPYDISVLQVSSVLSSSEAEAPVPPPAPVNLTELLSKKYCKSFAGLLAANADVFRAVNETKDNGLTLFCPVDAAVAAFMPSYKNLTAKAKTAILLYHAVPDYFSLQLLKSNNGMVTTLATASESKKDYSYDVQNKGETVTLDTRVVNSAVTATVGDAEPLAVYAVTKFLKPKELYKVVEAPAPAPEPSKKHKSAADDSSDDSSDDSGDVKAHKGAAAPAPLARWVTAAAAAAVAALMLMA

SEQ ID NO: 307 - DNA, 1159 bp, Oryza sativa
actcccacgcggcacgcaccccgctgcaccctgcaccacgctccactccacccccacccccaccccaccccacgccgcgccgcgccatgcgccgcctccgcctcgccgccgccgccgccgcgccacacggcgtcctcctcctcctcctcatcctcctgccgctcgtggccgcggccgggccggcggcggccaaggcgcccgcggccccgccggctccgcccaacgtgacgacggcgatggcgaagggcgggtgcaaggccttcgccgacctgatcgcggcgtcgcccgacgcgtcctccacgtaccagtccgccgccggcggcggcatcaccgtgttctgccccaccgacgacgccgtcagggcgttcctgcccaggtacaagaacctcaccgccgacggcaaggccgagctgctcctgttccacgccgtgcccgtgtactactcccgcggcagcctcaagtccaacaatggcgtcatgaacaccctcgccaccgacggcgccgccaagaactacaacttcacggtgcagaacgagggcgacgccgtcaccatcaagaccgccgcctccggggacgccgcgcgggtcaagtccacggtggtggacgccgaccccgtcgccatcttcaccgtcgacgcggtgatcgagccggtggagctgttcaagccggcgccgtcgccgacgcccgcgccgtcgcccgctccggcggcggacgctcccaaggccagtaagcccgcgcaccacccggcgcccgtcgtggcggacgctcccggccccgccgccaccgactcgcctccggcggaccagaagaaggaggccaagaagagcgcggcggccggcgcgccgccgtgcgtccggtggttcgccgcggcgttggccgccgtcgccatggcctccacattggcctagggcaattgttcttttttttttgtgttcttggttgatgatccattggcgtgatcgtggtgtgatggcgtgttgatgtgcttgcgagatttgtgcttactttcgtggaagaactagtggagtgcttaaatattttgttagtgctttcctagattttcgtttttttgtttgtgcctgctgttgctacttgttaattgttaattagcattagtagatcatgagatgttgatatcttatcagcattttggttttga

SEQ ID NO: 308 - protein, 268 aa, Oryza sativa
MASSPSTVFLVLSLTLATVSVVVVSGAGEAPSPAPTGPLNLTEILTKAGHYNTFVRLLKDTEVTSQVSSLLNNDRNGDGLTVLAPTDAAFGRLRPGTLNQMDAQAQAELVLYHVLPRYYGFVTFETTTNPVRTQASGQRGVCTVNVTTAGEDRVRVSSGVVEAELGRPLRDGHPLAVYSLDAVLLPPDMFGPGAKKDYGAADAPAAAGKHGKPQTASSSSVAAAPDEAPSKEVDATATAAAGRMAPAGWAAAFAGVVTAVVAVSLLSY

SEQ ID NO: 309 - DNA, 1182 bp, Oryza sativa
cacacattacgatcgatcttgaattcttgatcagttgagttgcattgcatgcagaaagctcatcacaagttcacaaccaatagcaatcaccaagttttttttttgacactgtgacagcatccaccatgcaagccatgcagagacttgtgctgtgtcttgttgtgtccatggccatcgcggcgtcggctcagggcccgacggcggcgccggccgcgccggcgccggcgacaccggcggcaccggcgacgccagcggcgcccgcgccggcgtcgacgaagacgacgaacatcacgggggtgctcgccaaggccgggcagttcaacacgctcatcaggctgatgcggtccaccggcgcggcggagcagatcgacaaccagctgaacagctcgcgcaacgggctgacggtgttcgcgccgacggacaacgcgttcacgtcgctcccctccggcacgctcaactcgctgtccgaccagcagaagaactcgctggtgcagtaccacgtgctgtccacgctgatccccatgtcgcagttcgacaccgtcagcaacccgctccggacgcaggccggcagcaactcgccggggcagtacccgctcaacgtgacggcggaggggcagcaggtgaacatctccaccggcgtcgtcaacgccaccgtcggcaacgcgctctacaccggcgacaacctcgtcgtgtaccaggtggacaaggtgctgctcccgatggccatctacagcacgccggcgcccgcgcccgcgccgctgtcgccggcgacgaagaagaaggggaagacgccggccacgtcggtcgccgacgcgcccgaggccgccgacgcgacgccggacgcgacgaccccgtctctcgcggcggcgagggtgacggccggtgctggtgtcggggtggttcttgccttggcgagcgtctggttggggctgtgacgatgaggttgatgacaagtttgagcgagatctctgtattgtacgcgccttccataattttttctgttgttttttttctctcttaattttttttgttgttgaaaaggtgttcttttcttaatgttctgtccatttttggttgaattattgctcgtcatatcattaccattattattgtaattgctaggagtatgtaatgtatcattggattcccatttttctgtaatgtaatggtactaaataaaca

SEQ ID NO: 310 - protein, 289 aa, Oryza sativa
MASRLSLLLLLALVLPASGDDAAAAEAAPPPAPAGGASFNVTEILGRFPEFGLFSYLISKTHVDRDINSRNTVTVLVPDNSAVDWLLRRSARLPRAALVELLSVHVVLDYFDAAKIAALPPGKPTVSTTLFQTTGNARRRTGFLAITPTAKGGAVFASAAPGALVNATLKRVVAAVPYNISVLQISNFVVPPGVLTRPRPGPGPLPLPSPPLPRMKPMAIAPTPAPVPAPTKMVPIPPSLPLTDPADEDGDEAPAAAPAPSHGNAVKVMSWWSGLGVLVGTMACVFGYL

SEQ ID NO: 311 - DNA, 834 bp, Oryza sativa
atgaggctcgccgtcgcgacgttcctcgccatcgcattgtccctctccctcctgctcgccggcgcgcttgcccggccgcccccggcgccggtgaggacggatgccggcggcggcgcggcgccggctccgcaggacaagggcggcaacctcaccgacgtgctcaacgtcgccggccccttcagcaccttcctcatgtacctccggcagaccaacctcgtggcggtgttcgagcaccaggcctaccggacccaccagggcatcaccatcttcgtccccgtcgacatggccttcgccgccatcgagccatcggtgttggcggggctatcgaggaaccagctgaagcacctgctgatgtaccactcgctggcgaagcactacacgctggcggagttcgacgggctgagccagagcaacccggtgaagacgctcgccggcgggaggtacgcggtgaacgtgacgtacgacggcggcgtggtccacgtgatgtcgaggtggtccagcgccagggtggtcgggagcgtgtacgagtcggcggccatggcggtgtacgagctggacacggtgctgctcccggacgcgctgttccacgcccacccgcccgtcgcggccaccccgcccgtgccggcgctgccgtcgccgccgccccacgccgatcacccgccgcccgacgacgacgacggcgacatcgacgactacgtcccggcgccgccgccggacccggcggcggggaagggcggcgccaagaggtcggcgtccggaccggcggtggtggctcacaaggccgcgagctacggagccgctgccgcgatgaccttgctggtgtcgtgtttgtga

SEQ ID NO: 312 - protein, 251 aa, Oryza sativa
MAMVARRFLVAAAAVCLALAAVPAAMGQAAAPAPKGAAAAALNVTAILEKGGSYTTFIRLMKSTQQDTQLNSQLNGTSTGFTVFAPTDGAFSSLKPGTLNSLSAQDQVSLVQAHIVPKFYSMDAFDTASNPVRTQASGGDGPYTLNITATSTNQVNVSTGVVDTTLGTALRADQPLAVYSVDKVLLPYALFGPKPPPSPPPAPSKKPAKGDTSASAEAPAGSADHPAGAAPAAARAAGWGVAALLAAACLL

SEQ ID NO: 313 - DNA, 1703 bp, Oryza sativa
cccctcccccactcttcccgagtcggtcagtatagtgagctgagctccccccacccccccccccccaccccacccactgtggcggcgaagatgcggggacgacagatccctcctcccaccgccgccgcctcctcccgcgtcgtcgtcgcggcggtggccgcgctgctgctcgccgcggcgctccagccgctgccggtcgcgtccggggtggacgtggcggcggtgctcgcggcgttcccggacctcgccggcttcgcgcggctgctcgcgtccagcccggtggccagggagctcgcggggcggtcgtcgctgacgctgctggccgtgccgaacgggaacctcccccagtcgccgtcggcgtacgccgcggcgtccggggccgacctcgccgacgtgctccgctaccacgtcctgctcgagtacctcgcccccgccgacctccgccgcctgccggcatccgggaagctggtcaccacgctgttccagaccaccggccgcgcccccgccgacctcggcgccgtcaacgtcaccgccgcggggccgtccctcgccgtcgtccgctcgccggcgccgttcccggggtcgaacgccaccgtgctcggcgccatcaccgccgtgccgtacaacctgagcgtgctcgccgtggacggcctcatcgtgccgtccgggttcgacctcgcggcgtcggagtcgcggccccccgccgccgtcaacatcaccaaggtcctcgccgacgcgcgggccttcaacgtggcggcgtccatgctggaggcctccggcgtggcggacgagttcgaggccgacgagcgcggcgccggcatcacggtgttcgcccccaccgacgacgccttcgccggcctccctgccggcgaccgcctccagtccctccccgccgagcgaaaggccgtcgtactccgcttccacgtcctccactcctactacccgctcggctccctcgagtccatcgtcaaccccgtccagcccacgctcgccaccgagttcacccaggccgggcgcttcaccctcaacatcacacgcgccaacggctccgtcgccatcgacaccggcgtcgtgcaggcgaccatcacacgcacggtgttcgaccagaaccccgtcgccgtgttcgccgtctccaaggtgctcctcccgaaggaaatgttcagccgcagcgactccgccatcgtcgccgtcgcgtcggcgcccccgccggccgcgctgccggcggaatcacccgagagcgcgccgacaaagctatcgtcgccgccggcgctgcgcgacaccgccggcaacgcgaaccacacggcggcggctgcggcggtggcggcagcggcggcgacgacgaaaccgacaattggccggtggtgtatagcattgttgtatctactactactaccactactgctacctctggtatgagatccggttcgtttgcttgtccattaccatccttgttgagctcgaatttttgcttttcttttttcttttctttttttttgttataacctgtacactggggaaggggagaagtttgagaagaggtgaattcagattgagctgcaaagcagcattattattattattttcgctttctttttttctttttgttcttaccagctgcttcatgttggcaaaagggaaataatagtactagtaatgtaccatcctgtaaagatccaatcgattccatgttcatgttgtgcctg

SEQ ID NO: 314 - protein, 415 aa, Oryza sativa
MELLLRRLAVVVAVVALTAATAAEGYNITKILGDHPEYSQFNKLLTETRLAGDINRRRTITVLVVANGDMGALSGGHYTLPTLRHILEMHILVDYYGAKKLHQLARGDTASSSMFQESGSAPGTTGYVNITQHRGGRVSFTAEDAADSATPSSFVKSVKEIPYDLAVLQISKPLSSPEAEAPVAPPAPVNLTELLSKKYCKNFAGLLASNADVYSNINATKDNGLTLFCPVDAAVDAFLPKYKNLTAKGKAAILLYHAVPDYYSLQLLKSNSGKVSTLATASVAKKDYSYDVSNDRDSVLLDTKVNSASVTATVKDADPLAVYAISKFLQPKELFKVTEDLAPAPAPEGPKKKTKKKKPSTTSAAAAPSDDSSAADSPDGTPADDVADKAAAAPSVLARWVTAAATVAAALALAA

SEQ ID NO: 315 - DNA, 853 bp, Oryza sativa
ggagagcacagcaaccatggccgccgtcgccgccgccgccggactcatcctagctctcgccttcgcgtcgtcgtcgccgcccgccgccgcggcggtcaagttcaacgtcaccgagatcctgcacgagttcccggagttctccgtgttcaacggcctcctctcgcagacgaggctcgccgaggacgtcaacctgcggccggccgtcaccgtcctcgtcgtcgacgacgccgccgccggcgccatcacgtcgctcccggaggccacgcagggggaggtggtggcgctgcaggtgctcctcgactactacgaccccgtcaagctgtacagcctcaaggcgaagacggcgctcctccccacgctgctccggccgaccgccgccggcggcggcggcggaggcgtggggctcgtgaagtacacccaggtcgccgacgaccagatggcgttcggctccggcgagcccggcgcgccgatcgggtcgcagctggtgaaggtcgtggcgtgccggccgtacaacctctccgtcatgcaggtcagcgcccccatcgtggcgccgagcttgggcggcccctcttccggcggcggcacgccgccgtcttctccggcgacggccaagagcgccgacgacgcgtcggcctcctcgatgacggactacgacgacgatcccatcgctccggcggcggttgatggtccgggaattgtggatacgccgccgacgaagacgacatcgccgtcgacaaacgggacaagtgcggcggcggacgggacaacaacgtcggcgggaagctgcgcggtggtggccggcgcaggcgttgggctgatggcggcggggctcgtgatgttcatttcagtttaa

SEQ ID NO: 316 - protein, 247 aa, Oryza sativa
MARSVAVVVLLAMAAVAAAQAPGPAATPAAGATGPPNVTAVLEKGGQYTTFIRLMKETQQDTQLNSQLNNSFNGNGYTVFAPTDNAFNNLKPGTLNSLTQQQQVALVQGHVLPQFYSMDSFQTASNPVRTQASGTDGPYTLNITSTTNNNVNVSTGVVEVTVTNALSAVKPLAVYSVDKVLLPFELFGVKAPAAAPTASTAKPKKGGSTEAASGPAGAEDAEPTGAASARAVGWGVAGLAAVVGCLL

SEQ ID NO: 317 - DNA, 636 bp, Oryza sativa
atggcgttggccggaaccctcaacgcctccaccgtcttcttcctcctcctgctgctcctctgcgtgtcagtgatgtcaccacccttcacacctgcatcggcgagtcccatgggcctcaccgccgacgcgaaggtggcgctcctgctgtaccacgccgtcgcggcgcacttctccgaggaggcgctcaaggcgatcaacggggaggtgaacacgctggccaccgacggcggcggaggaggcaaggtcttgaacctcaccatcgaggaggacgacgacggcgccggagccaccgtgaaactgtcgtcgtcgtccgggaacgtggcgcgggtgaccaagacgatccaggacgcggacccccacgccgtgtacctcatcgacgccgtgctaatgccattggatgtggtggtcaacgtctcttccggcggcggcgcggctgccccttcaccggcgccggtcacttcacctgcacccgcacctgctcaggccacaaatccgtccccttcgccggacagcaagcccgacaatcagccggccgcggagcagcctccggagaacagcgcgagcaggggcggcatggcagcgtggagtctgctctcggtggtcgtgccggccatagcgtcgttggtgctccggtga

SEQ ID NO: 318 - protein, 213 aa, Oryza sativa
MASSKMTLLPVLLLLAAASPAALGAFDVNQMLADKSQYGSFLKLLTQTKVAEETNRLKSASLLVLQDKAMKPITSLPADKQRMAMANHVLLKYFDPIQLGEMKDRTAMLPTLLSNTDKKLGVVNYTKASDGQMYLGAPGAACVAKLVKVVAARPYAISIMEVSEAILPPALGGSGGPGRRAKGGKGKVKPKSSDADEAAAKPATEPKATDVPK

SEQ ID NO: 319 - DNA, 1130 bp, Oryza sativa
atctcattgcactaaactgctcactgcatttgcatgcacgtggccaagaagagtttggcatccatggcggcttcggcgacgacgaccatcctcgtggcggcgatgttggtggtgatggcggtggagtctccggtggcgaacgggcaggcggcggcggctgcgccggcgccggcgccggcggcgccgaagacgatcacggcgatcctgaccaaggccggtcagttcaccaagttcctccagctactgcagtcgacgcaggccggcgagcagatcaacaaccagatcaaggggaaggcgtcgtcctccggcgggctcaccgtgttcgcgccgccggacaacgcgttcgcggcgctccccaccggcaccctcaacaagctctccgaccagcagaagacgtcgctggtgcagttccacgtcgtgtccgcgctgctccccatggcgcagttcgacaccgtcagcaacccgctccggacgcaggccggcgagaccgccgccggcaagtacccgctcaacgtcaccgccgagggctcccgcgtgaacatctccaccggcgtcgtcaacgccaccgtcgacaacacgctctactccggcgaccgcctcgtcgtctaccaggtcgacaaggtgctgctgccgtgggcgctctacggcccgcccgtgcccgcgccggcgccgtcgccggcggacaaggccaagaagaaggccggccccgtcggcgtggccgacgcgccggcggccgacacggctgccgggacgacgacgacgacggtggcgacggcgtcggaggcggcggcgcggggcacggtgcggcggggcttggtcggcgtggccgtcgccgtggctgtcgcgtggtgtggcatgtgacagtaaaggagaatgttggagattgccaattcaccatgggatttttttttcttttaattttgtggaaaggtgttaaaattgttttgttgttttggtttttcttgttctttttgtatgatttggtaggattttgttttgtccgtgtcctatgttgatcttttagagtttttcactgtgtgttgtatgtcttttcgtggttgttatatatgtaataagaagtgtttgtatattgtggtatctaatttgttacttgacatcgttcaccttcc

SEQ ID NO: 320 - protein, 474 aa, Oryza sativa
MGAPVRGALVFLLLLAGAAAETAPEEPTLPSAAADGAASSGTTSGAGAGTGINSNSVLVALLDSHYTELAELVEKALLLQTLEDAVGKHNVTIFAPRNEALERDLDPEFKRFLLEPRNLKSLQSLLLFHVLPARLPSGSWSAVSHPTLSGEEVELAAAANDGAMRVAHAAVTRPDAVLRPDGVIHGIERLLVPRSVQEDFNRRRSLADISAVLPTGAPEVDPRTHRLKKPAPPVPPGAPPVLPIWDAMAPGPSIAPAPAPGPGSGKHHFDGHSQVKDFIQTLLLYGGYNELADILVNLTSLATEMGRLVSEGYVLTVLAPNDEAMARLTTDQLSEPGSPENILYYHMIPEYQTEESMYNAVRRFGKVRYDTLRLPHKVVAREADGSVKFGHGEGSAYLFDPDIYTDGRIAVQGIDAVLFPPDDTKTAPDTAPVRRAPAVTGTRKKNKLRRGKLLEATCQMAGILGQRLRFASCQ

SEQ ID NO: 321 - DNA, 1142 bp, Oryza sativa
acatgcaatatgtgcatatgcaaacctctcctacctcacactccaccctagctagcccactacacctcctacaccctcaccatccaatagcgcagtgacagtgccaatggcctctcacaccaccctcatcctcctcctccctctcctcgccgccgcggccgtcgccgccgcggacgtcgcccctgcgccggcgccacctgcggcgcagacgatcaacctcacgggcatcctcgagaagggcgggcagtacaacacgctgctccgcctcctcaacgccacccgcgtcggcgagcagctgggcagccagctgaagaccacctacgacggcctcaccttcttcgcgccgacggacgccgccttcgccgcgctgaggccgggcacgctcaacggcctgagcgaccaggagcaggtgcagctggtgctctaccacgtcctcccgcgctactacaccctcgccacgttccagacggccagcaacccgctgcgcacgcaggccacgggccccgccggcgtgtacaccgtcaacgtcaccaccaccacggggcagagcctcgtcaacgtgtccaccggcgtcgccgccgtccccctcggcaccacgctctccgccgacttcccgctcgccgtctactccgtcgacggcgtgctcctgccggagcagatgttcgggaaggccaaggctcccgcgccggccgccgcgcccgcgtccgccgccgggaagggcgccaataaggagcacaagaagggcggcgccatgcccaagaatgaggtcgcggccaccgcgccgacggccggagctggaggagaagattcagatgacagcgccaccaccaatgcggtggccgttgcaggcgcggccggtgtggtgtggactgctgctctcgtggggattgccaatcttgtcatcgcgtagaaagtgtgtgcttgtctttttctccttcgccgttttctttcgttttcgtcgttgcatatgtttcattgcacgtgtcctattttgtatgtatgcaagagtatttatatatgttgatgatgattcactcagtgaaatttactggcttcttttggtctttccattgcatgtgccctactttgtctgtatctgagaatagttatatagatgattcactcagtgaattaaattcact

SEQ ID NO: 322 - protein, 304 aa, Oryza sativa
MACKNASSSAMPLLLVAGTVVLALLASPAAAFNITRILGEFSDFSTFNHLLTQTKLADEINRRQTITVLALDNGAAGGVSSLPSDEQRKVLSVHVVLDYYDTEKLGGMKMKNRSAVLTTLFQSSGQATDRMGFLNYTKRSDGIMVFGSAEPGAQATSQMVKVVVTRPYNISVLQVNSPIVPPGIASVSNSNTGAPPPHPAKSSAPAPSPSKSKGKKSDAPAPGPSDDVDDDTAADAPGPAVDGPTADGPAADGPAADGPTEADAPAHDKGDVADAPSAAGRAVASSAGLGVVALVVLIFPSVSL

SEQ ID NO: 323 - DNA, 1253 bp, Oryza sativa
gctcacacacacactctccctcgccaccaaccacactataagtctattaaacacgcactgctcccagctctcagatcgccgcctccaccaccgttcgtccgattcctcgccaccacacccacccacccaccaatggcgtcctcccgcctcctcctcctcgccgcgctgctcgccacggcggcggtgctggcggcgtcgcagaagccgaaggccgccacgccgacgaaggccacgccggcgtcgcccggccccgcggcggcggcggccgacggccccgcgccgacgaacgtgacggcagtgctggagaagtccggcaagtacaccaccttcctccggctcctccacgagagccgggtggacacccagatcaacagccagctgatggacagctacaacgggctgaccatgttcgcgcccacggacgccgcgttcgcggcgctcaagccgggcacgctcaactcgctgtcgtcgcaggaccagatccagctgatgctctactgcgtgctcccgcggttctacagcctcgccatgctcaccaccctcggcggccccgtgaacacgcaggcgtccggcgccgacggcccgtacaagtacaagatcaagccgtcgaacaacaacgtcaacatctccaccggcgtcaactgggcgctgctctccaccgtcgtcagcaaggacttccccctcgccgtctactccgtcgacaaggtgccgctcccctacgagctgttcggccccaagccgcccacgcccgcgccggcgccggcgcccgcgccgtccaagtccaagaccaagaagcacaagaagtccgccgggatcgccgagccgcccgtcgccgacgacgcctccgccgacgacaccaccaagaaggccgccgcgcccgccaccgccgtctccaggtgggtcgtcgccgccgccggtgtcttggccggcgccattctcgccgccctctaagctaaggagacgacgacgacgacgaacaaatgcatcgcccatgcatgccgtatgcacgatgactgaactggagtggtgaaccgaatccgaatccgaattgatcgagatcgattgaaccgtgtaccgatattgttgtgctgctctgtatgtccatcggctttattctttctcttattttttttggggttataaaatttcttgttgatttgtatttgtaatttatgtgatatacttactagagtgtactttttttttcccattggattctaccgcatgaatcatttcaaaattttcgatctgga

SEQ ID NO: 324 - protein, 278 aa, Oryza sativa
MAAVAAAAGLILALAFASSSPPAAAAVKFNVTEILHEFPEFSVFNGLLSQTRLAEDVNLRPAVTVLVVDDAAAGAITSLPEATQGEVVALQVLLDYYDPVKLYSLKAKTALLPTLLRPTAAGGGGGGVGLVKYTQVADDQMAFGSGEPGAPIGSQLVKVVACRPYNLSVMQVSAPIVAPSLGGPSSGGGTPPSSPATAKSADDASASSMTDYDDDPIAPAAVDGPGIVDTPPTKTTSPSTNGTSAAADGTTTSAGSCAVVAGAGVGLMAAGLVMFISV

SEQ ID NO: 325 - DNA, 1256 bp, Oryza sativa
gcgtggagagcaacgctcgctgcgacctgcgacgccgccccgcgccaacttctctccctcccacctccaccacctcctcctcctcctcctcctctcctacagcgccacaatgccgcgcgcccgcgtcgtccacgtcatgctcctcctcttcgtcgcgctcggcgcgtgccgtgccacccacaacatcaccgccatcctcgccgaccaccgcgacctcgccgagttcggccgccagctcacggccacgggcctcgcggacgacatcgacgggcgcaacaccatcacggtgctcgccgtcgacgacgcccacatggcgcagctcagggcgcgcgggctcccgcgcgaggcgctgcgccacgtgctctcgctgcacgtcctcgtcgactactacgacgacgccaagctgcaccgcctccccggcggctccgcggtcgtgtccacgctgttccaggcgtcgggcgacgcgcccgggagcgaggggatggtgaagatcgccgtgcgccgcggcggccgcgtcgcgttcgtgccccaggacgtcgacgacgcccgggccaacgtgttctacgtcaagtccgtgcacgaggcgccctacaacatctccgtgctgcaggtcagcgccgtgatcacgtccccggccgccgaggcgccgtcgtcggcgacggagtcgaagcccaactctacggacgcctcgtccaagcacgggccgccgaatgctggtgcacacgctgcaccgtcgccggtggggcaaggttcgtcgtccgacgacggcgccgacgaggggaagaaatccggcgacggaggagatggtggcaagaagaacggcgccagcgtcggcgcggcaccgcgtgggctacccttcgctctggcgtttctcatggctgccagtgccatcctcgtggtgaattggtgatcgtgtgaaactgtgaagttgatcaccaacgttgtcttgtgaaattcattttgggtgaatttgcacgtttctgtgccacttttgttggggatttcgtgagtttttccactgttaggtaccttaggttcatggtgcattggtgcttggaaatgtgttgaattgtggtttgcaagttagtagtaccattttgtgtcgtcaacttaatttgcacgcgaacgtatgatcattcatcagctgtattctgagtccaaaactccaagtcgaattatgtaatgatctgatcaaactgaaatgcatctgttcttcagatatgcatatacgtgaacgggaaaatgactctgcatgc

SEQ ID NO: 326 - protein, 211 aa, Oryza sativa
MALAGTLNASTVFFLLLLLLCVSVMSPPFTPASASPMGLTADAKVALLLYHAVAAHFSEEALKAINGEVNTLATDGGGGGKVLNLTIEEDDDGAGATVKLSSSSGNVARVTKTIQDADPHAVYLIDAVLMPLDVVVNVSSGGGAAAPSPAPVTSPAPAPAQATNPSPSPDSKPDNQPAAEQPPENSASRGGMAAWSLLSVVVPAIASLVLR

SEQ ID NO: 327 - DNA, 1166 bp, Oryza sativa
ctcactcaggtggtgcagttgctggcgttgcacacgactacgtaatacgtaggcgagatttctgcagcgacgatggagctgaaatccgccgtgctcgccgtcgcggcgctgtgcctcgcgctcgcgctcctgctcccgcgcgtcgcgctgtcacagaggctagctacagcggacgcccccgcgccggcgccggcgccgcgccacgtcgacctcgccgagctgctctccctcgccgggccgtacggcacgttcctgggctacctcaccaagacgggcgtgatcacgacgttccagagccaggccaacgacaccgccgccggcgcccccggcgtcaccgtgttcgcccccgaggactcggcgttcgcggccgtcggcggcggcgccgcgctgtccaacctcaccgccgaccagctccgcacgctcatgctgtgccacggggtgccccggtaccacccgctctcgtcgttctcggcgctggccgcgtcgggcccggcgcccacgttcgccggcgggcagcagtacgccgtgaacgtcactgacgccgccgggacggtccgcatccagtccggctgggccaccgcgaagctcgtcagcagcgtgtactcgacgtcgcccgtggcggtgtacgcgctgaacagggtgctgctgccggagcagatcttcccgaccgcccctaaggtcgcacccgtgccggccccggccccggcgccggtgcacggggacaaggcgaacgacggcgcaccgggcgcaggcgagcttggcgcctcggacgtcaagagttcgtcgtgccgggttggcgccgggcgccttctcgccatcttggctgtaatggtatccagtttttctgatgatatagtggtgtgatttttttttttttggcgtgggtacatatatacagtacttccctcgtttcataatgtaatactttctaccattaaccacattcatttagatgttaatgaatctagacatatgcatgtatttagattcattaacatttatatgtatgtgggcaatggtaaaaagtcttacattgtgaaacggagggagtaatgtttatgttttttgtcaattcgtttgtcgcatctctgtatgtaaacattcattttgcatgaacatatctgcaaataacattttctggcagtttaaacgaaataagattctac

SEQ ID NO: 328 - protein, 275 aa, Oryza sativa
MHVAKKSLASMAASATTTILVAAMLVVMAVESPVANGQAAAAAPAPAPAAPKTITAILTKAGQFTKFLQLLQSTQAGEQINNQIKGKASSSGGLTVFAPPDNAFAALPTGTLNKLSDQQKTSLVQFHVVSALLPMAQFDTVSNPLRTQAGETAAGKYPLNVTAEGSRVNISTGVVNATVDNTLYSGDRLVVYQVDKVLLPWALYGPPVPAPAPSPADKAKKKAGPVGVADAPAADTAAGTTTTTVATASEAAARGTVRRGLVGVAVAVAVAWCGM

SEQ ID NO: 329 - DNA, 1595 bp, Oryza sativa
gcggcctcaccaaccaccacgcaaacccattgttaattaattagcggcacactgtcacggcgcattatttgctagctccagtgacagctcactcctcttcttgctgctgagggcttagctagccagtccacctcgtcggtgtgtgtcggtgtagtctagcagctgcggcgggaggaggagttgccggccggagatggcagcggcggcgcagcggcttgtcgccgctgtcgtcgtcttggtggcctgcctggcgttgccggcggcgcgggggctgaacatcacggcgatgctgaacgggtacccggactacaagatgttcaacaagtacctgtcggagacgaaggtgtgcgacgagatcaacgcgagggagtcgatcacgctgctcgtcctcggcgacgggccaatgtcgacgctcgtcctcgacgccgaccagtcgctggcgggcatcaagaacgcgctccgcctccacgccatcctcgactacttcgacccgaagaagatccgtggcctccccgacgccgacacgatgaccgacacgctctaccaggccggtggggacgccgccggcaagatgggcaacgtcaagatctccaccctggacaccggcaagatcgccttcgcgtccgccaacccggggggaaagtacgaggccaccatggtcaaggccatcaagcagatgccgtacaagctctccatcatggagatctcggcgcccatcgagttcgacggcctgttcgacacgccgtcggcgaccaacctgacgaggctgctggagaaggccgggtgcaagcggttcgcgtcgctcatcaccagcaccggcgtgctcaagacgttcgaggatgccatggacaaggggctcaccctgttcgcgcccaacgacgacgcgttcgacgccaagggcgcccccgacgtcaagaagatgcccagcgccgacctcgtcacgctcctcaagtaccacgcgctgccgtcgtacaaccccaagccgacgctcaagacggtgtcgcgcgccatgcgcacgctggcgtccaccgcgtcggggaagtacaacatcacggtggacacgcggggcgacgccgtgacgctcaacacgggcgtcgacaagtcccgcgtggcggccaccgtcatcgacgacacgccggtgtgcgtgctcacggtggacaacctcctcatgccggtcgagctcttcggcgacgcgccggcggcggccccgagcccggacgacgcggcgcccgccccgtcgccgtcggtcgcggacgcgtctccgccggcgccgccgccggccgacgcgccgtcgaagccggcggatcacaaggaaatgaaggcgtcgtccgccgtcgcgttgcggtcagtagtgctcggcgcattagccgcggccgtgtgttccttcgtgctgctttaagcacaagtttttttttccctttcttccatgtccagtgccggtgattgtgattgcacgagctgcattgccaattattcctctgtataatgcgagcaaactgtgtacattttgttctaattctgatatccttttctccgaatcgtctgcgccatttcggtgcggtgaatttggaagaattcatgtcgcgttgagctgt

SEQ ID NO: 330 - protein, 272 aa, Oryza sativa
MASSRLLLLAALLATAAVLAASQKPKAATPTKATPASPGPAAAAADGPAPTNVTAVLEKSGKYTTFLRLLHESRVDTQINSQLMDSYNGLTMFAPTDAAFAALKPGTLNSLSSQDQIQLMLYCVLPRFYSLAMLTTLGGPVNTQASGADGPYKYKIKPSNNNVNISTGVNWALLSTVVSKDFPLAVYSVDKVPLPYELFGPKPPTPAPAPAPAPSKSKTKKHKKSAGIAEPPVADDASADDTTKKAAAPATAVSRWVVAAAGVLAGAILAAL

SEQ ID NO: 331 - DNA, 1755 bp, Oryza sativa
gtctccttcctcctcgggcacctcttctcctcgcttactcctcagtcccccacccaccaccccagttgctccccccgctggcgagatgcggggcggagcgggagcccttccggtgccaggcggcctcgcgctcggggtggtgctgcttctagttctcgccgtgctgccgtcccgggcggccggggtgaacgtgacggccgcgctcgcggctttccccagcttcgccgacttcgcgcggcttctggagtcgagcccggtggccggggagctggcggcgcggtcgtcgctgacgctgctggccgtgccgaacaacaacctgccgcgctcgccctcggcgttcgcggcggcctccggcgccgacatcgccgatgtgctgcggtaccacgtcctgcttgagtacctctccccttctgacctcgcgcgcctccccgcctccgggaagctcgtgacgacgctgttccagaccaccgggcgcgcgccctccgatctcggcgccgtcaacctcaccgtcgggggaaactccaccgtcgtggtccggtcgccggcgcctttcccggggtcgagcgccactgtcctcggcgccgtcaccgctgtgccttacaacctcagcgtgctcgcggtgggtggcctcatcgtcccctccgggctcgacgtcgcggcctccgacagccgcccggccggtggcgtcaacatcacccacgtcctcgcggacgcgcgggggttcaacgttgctgcctccatgctggaggcatcgggcgtcgcggacgagttcacggcagacgagcgcggcgccggcatcaccgtcttcgtgcccaccgacgacgccttcgccgacctccccgccaccgaccgcctccagtccctccccgcagatcgcaaggccaccgtgcttcgcttccacgtgctgcactcgtactatccgctcggctccctcgagtccatcgtgaaccccgtgcagcccacgctcgccaccgagcgcttcgaggccggccagttcacgctaaacatcacacgcgtcaatggctccgtcgccatcgacaccggcatcgtgcaggcttcgatcacccgcacggtgttcgaccaaaatcccgttgcggtgtttgccgtctcgaaggttctactgcccaaggaaatgttcggtcggggcggtgctgatagcgacgtcatggcgccgccgccggacgcgatggcgccagatgctgccgagaacgtgcggacgccgccgacgagactgtcgtcacctccagcactgcggggtggcgctgatagtgagtcgtcatcagcattgtcaacggcaagggctgtcaattggtggtgtatacgcccttgttaatgatataaatgggaccagccgaggaaaatccatttactggagtagctgtttcggaaggaagtagaagtttgcctggttccttcaataggtgagttaccaatgaatccttgtggcacgttcatttcatttcttttaaacaattgtgtggatattgaacacttgtgaggattgacgatattaaccaatagggtcggtgttttacatagccggttttcacagcactattgtgatgtcggaggtaaaatgctaagctccagtacgttccatcgcgtgctattgtggcgctgtagagttttggtgaccatgacatgaaaagtctgttattgaaccttaggtttgaattctgtacttgtgagggaaatctagtactcccatggtaggatcttgtacagaacatcgcataattcaggcatacactctct

SEQ ID NO: 332 - protein, 266 aa, Oryza sativa
MPRARVVHVMLLLFVALGACRATHNITAILADHRDLAEFGRQLTATGLADDIDGRNTITVLAVDDAHMAQLRARGLPREALRHVLSLHVLVDYYDDAKLHRLPGGSAVVSTLFQASGDAPGSEGMVKIAVRRGGRVAFVPQDVDDARANVFYVKSVHEAPYNISVLQVSAVITSPAAEAPSSATESKPNSTDASSKHGPPNAGAHAAPSPVGQGSSSDDGADEGKKSGDGGDGGKKNGASVGAAPRGLPFALAFLMAASAILVVNW

SEQ ID NO: 333 - DNA, 1281 bp, Oryza sativa
atgcacctcttggttgagaggtgtggtcgtggtggtgcctactgacctgcaatgcaatggccgcaacagccgccaccccccatatgaatctcataatttattctcttcctttccacacaaacaccaacctttctatatagcatcccctcccctcaagtctcaacactttgccgtccagttgccctcttcttctcttctcttctccttcccctgctctgctcagggatcaggatcagaggagaagagaagatggagttcaaagcagccatgttcgcggccgccgtcgtagccgtcctcctatcgtcgccgtcaccggcattggctcagaagaagagcccgccggcggcgccgtcgccggtgtcgcttccaccgagcttggctccggcgccggcgccggcgccgcactacgtcgacctcgccgagctcctcagcgtggccgggccgttccacacgttcctcaactacctggagaagacgaacgtcatcgagacgttccagagccaggcgaacaagaccaaggagggcgtcaccatcttcgtccccaaggactcggcgttcgccgccatcaagcagtccaccttttccaacctcaccggcgaccagctcaagacgctgctgctgtaccacgcgttccccaagttctactccctggccgagttcaagaacctcagcgagctcaacccggtgaacacgttcgccggcgcgccgtacacgctgaacctcaccgacgacatgggcaccatctccgtgcagtcgatgtggtccaggcccaagatctcgagcagcgtgtacgccacgaggcccgtggcggtgtacgcgctcaacaaggtgctcctgcccatgcagatcttcagcaaggacccgccgctggcgccggcgcccgccccggcgccggtgtccggggcgtccgacctcgcgcccggcccggcgtccggcaagacgggcgccggcggcggcaaggcggactcgacgagcgccgcgtgcggcgtcggcgccggcgtcgtcaatggcttggtgatggcattggctggtagcttgatgctcctgtggtgatgatcagagagagagagagagagagagttcttggagtcaaatttgcaacagcagcacattgttcatgcttctccacacttgattctattttgaattgatttgaaagagccattcttttggacatagtaggcaatgtttgtaggatcgaattggagtatttttttttacaacgtattacgatcataattcataattactcatctgctgatggatgaatgaatatgaaaa

SEQ ID NO: 334 - protein, 267 aa, Oryza sativa
MEFKAAMFAAAVVAVLLSSPSPALAQKKSPPAAPSPVSLPPSLAPAPAPAPHYVDLAELLSVAGPFHTFLNYLEKTNVIETFQSQANKTKEGVTIFVPKDSAFAAIKQSTFSNLTGDQLKTLLLYHAFPKFYSLAEFKNLSELNPVNTFAGAPYTLNLTDDMGTISVQSMWSRPKISSSVYATRPVAVYALNKVLLPMQIFSKDPPLAPAPAPAPVSGASDLAPGPASGKTGAGGGKADSTSAACGVGAGVVNGLVMALAGSLMLLW

SEQ ID NO: 335 - DNA, 1337 bp, Populus trichocarpa
tctctctctctctctctctctctaaacacaatgcagcggcttactatactcctttctctacttttcctcctctccacttccaccaccttcactcgtggccacaatattactcatatacttggcaagcacccatctttctccactttcaaccactacctcaccctaacccacctcgccggagaaatcaacagccgaaacaccatcaccgtctgcgccgtcgacaacgcagcgatgtctgaactcctttcaaaacacccatcaatcgccaccatcaaaaacatcctttccctccatgtcctcttggattacttcggcaccaagaaactccaccagatacgagagggcacggcgttggcagccaccatgttccaggccaccgggtcggctcctgggtcgaccggattcgttaacataacggatgttaagggagggaaagtggcttttggacctgaggataatgaagggaatcttgatgtcttttatgtcaagtctttggaggagataccttacaacatctccgttatacagatcagtaaggtgttgccgtcggacgtggcagcggcgcctacaccagagccaagtgctatgaatataacagatataatgtcagctcatgggtgtaaggtttttgctgacactttgattgcaaatcctgaagcttcaaagacatatcaggacagtgttgatggaggattaacagtgttttgccctctcgacgatccattcaaggcctttttccctaaattcaagaatttaacagcttctggcaaagtgtcatttcttgaattcttcggtgtccctatttatcagtccttagctatgttaaaatccaacaatggaatcatgaacactttagctacagatggcgaaaagaagtttgatttcacagttcaaaatgatggtgaggatgtgacactcaagaccaggagtatcactgcaaaaatagttgggactttgatcgacgaacagccactagctatatataccattgataaggtcttgctgccgaaggaattgtttaaagcagcaccaacaccagctccagcgcccgccccggagaaggaggtggctgatgcaccaaaatctagcaaacataagaagccatcctccgatgttgttccatcagactcaccggccgattcacctgatggcgacctagcagatcaaacagctgatgacaatgctagtgtgacattatatggtggaagacttgttgccatgttattgagtttgtgctcagggcttttgctgctgtgagttcctttaaattgagaattttctactcacggcgaggagggagtcagacctcgatggctaatttatcacccatttagagt

SEQ ID NO: 336 - protein, 408 aa, Populus trichocarpa
MQRLTILLSLLFLLSTSTTFTRGHNITHILGKHPSFSTFNHYLTLTHLAGEINSRNTITVCAVDNAAMSELLSKHPSIATIKNILSLHVLLDYFGTKKLHQIREGTALAATMFQATGSAPGSTGFVNITDVKGGKVAFGPEDNEGNLDVFYVKSLEEIPYNISVIQISKVLPSDVAAAPTPEPSAMNITDIMSAHGCKVFADTLIANPEASKTYQDSVDGGLTVFCPLDDPFKAFFPKFKNLTASGKVSFLEFFGVPIYQSLAMLKSNNGIMNTLATDGEKKFDFTVQNDGEDVTLKTRSITAKIVGTLIDEQPLAIYTIDKVLLPKELFKAAPTPAPAPAPEKEVADAPKSSKHKKPSSDVVPSDSPADSPDGDLADQTADDNASVTLYGGRLVAMLLSLCSGLLLL

SEQ ID NO: 337 - DNA, 920 bp, Populus trichocarpa
caacaaaacagcactcctagctacttcaagatgaggccacaatctttcatcttagcattgtctcttatctttttcttcctccattgtacaaaaacgttgtgccagtcacctgccgcggccccggctatggcgccccctaagacaccagtgaaggcaccgcctgcagactcctcacaggcaccatctgcacaggttgctacatcacctggccccgttgacgtcaataaaatcttgcagaaggctggccacttcacagtcttcgcccgcctgatgcaagctacaacagaagacaccgagttaaacaaggagctgaacaccacaaacaatggaataacaatcctggcaccaactgacaacgcattttcgagcctcaaagcaggctttctcaactctctaagcgatgaagacaagactgagctggtgaagtttcacgtgctgcctgcatttatatcaacatcccaatttcagactgtgagtaaccctgtaaggacacaggcggggacaggtcccagggtaacactaaatgtcaccaccaccgggaatttcgtgaatataagttcagggctgacaaatacaagcatatcaggcactgtatacactgacagccagcttgctatttatcaacttgataaggtactatttcctttggacatatttactcctaagcctccagcccctgctcccgagccagcactgggaaagcctaggaaagcagcacccgatgcagagagccctactgctcctaaggatatttctggtgctccagctctgctttttctgcataacaacgccttgcttcttgcagtcagctgtgcgtttggtgcaataatacattcatgagttacataagctggggcctggcctgggtgcagatatatatttctggtccctttccatgtttttttttttttttaatttta

SEQ ID NO: 338 - protein, 406 aa, Populus trichocarpa
MQLTVLLSLLFLLSTATTITYGHNITSILGQHPSLSTFNHYLTLTHLAGEINRRTTITVCAVDNAAMSEILSKKPSISTIKNILSLHVLLDYFGTKKLHQIRDGTALAATMFQATGSAPGSTGFVNITDVKGGKVAFGPKDNGGNLDVFYVKSVEEIPYNISVIQISKLLPSDVAAAPTPEPSAMNITDIMSAHGCKVFADTLIANPDASKTYQDTIDGGLTVFCPLDDPFKAFLPKFKNLTASGKESLLQFFGVPVYQSLAMLKSNNGIMNTLATNGDKKFDFTVQNDGEDVTLKTRGTTAKIVGTLIDEQPLAIYSIDKVLLPKELFKAALTPAPAPAPEEVADAPKSSKHKKPSADDAPSDSPADSPDGDAADQTADNNASVRLDGGRLVAMVLSLCLGLLML

SEQ ID NO: 339 - DNA, 1331 bp, Populus trichocarpa
ctctctctctctctctctctctctcttacaatgcagcttactgtactcctttctctactttttctcctctccaccgccaccaccatcacttatggccacaacattacttccatactaggccagcacccatctctctccactttcaatcactacctcaccctaacccacctcgccggagaaatcaatcggcgtacaaccatcaccgtctgtgccgtcgacaacgcagccatgtctgaaatcctttcaaaaaagccatcaatctccaccatcaaaaacatcctttccctccacgtcctcttggattacttcggtaccaagaagctccaccagataagagacggcaccgcgttggcagccaccatgttccaggccaccgggtcagctcctgggtctaccgggttcgttaacataacggatgttaaaggagggaaagtggcttttggaccgaaagataatggagggaaccttgatgtgttttatgtcaagtctgtagaggagataccctacaacatttcagttatacagatcagtaagttgttgccatcggatgtggcggcggcgcccacaccagagccaagtgctatgaatataacggatataatgtcagctcatgggtgtaaggtttttgctgatactttgattgcaaaccctgatgcttcaaagacatatcaggacactattgatggaggattaacagtgttttgccctcttgacgatccatttaaggcctttttaccaaaattcaagaatttaacagcttctggcaaagagtcactccttcaattcttcggtgttcctgtttatcagtcattagcaatgttaaaatccaacaatggaatcatgaacaccttagctacaaatggggataagaagtttgatttcacagtgcaaaatgatggcgaggatgtgaccctcaagacaaggggtaccactgcaaaaatagttgggactttgatcgatgagcagccacttgctatatactccattgataaggtcttgttgcccaaggaattgtttaaagcagcactgaccccagctccagcacctgccccggaggaggtggcagatgcaccaaaatctagcaagcataagaagccctccgccgatgatgcgccatcagactcaccagctgattcacctgatggcgacgcagcagaccaaacagctgataacaatgctagtgtgagacttgatggtggaagacttgttgccatggtattgagtttgtgcttagggcttttgatgctgtagtagcgtgtaagtcctttcaaattgttcttttttctactcacagtggggaataagtcaggcttcaatggctaagttatcac

SEQ ID NO: 340 - protein, 397 aa, Populus trichocarpa
MPRPLPLLTLAISLVLLASTTTVNAHNITRILAKHPQFSTFNHYLTVTHLAAEINRRQTITVLALDNAAMSSLISKQLSVYTLRNVLSLHVLVDYFGTRKLHQITNGTELTATMFQATGSAPGASGYVNITDLNGGKVAFGAEDNDGKLNAVYVKSLEEIPYNISILQISQPLNSAEAEAPTAAPTLNVTAILSNQGCKAFSDLLIASGAHTTFEENVDGGLTVFCPTDPVINGFMPKYKNLTAPQKVSLLLYHGIPIYQSLQMLKTSNGIMNTLATNGANKYDFTVQNDGEVVTLETKVTTATITGTVKDEEPLVVYKINKVLLPRELFKAAPEKKAPAPKGEKDVADGPNADAPSDESDDQTADNDNGVNKMGGGRLAVVAPSFFFGVVMFFLFD

SEQ ID NO: 341 - DNA, 1391 bp, Populus trichocarpa
gctacatcctgaaaaagaaaccccaggggaatggcacgaatcaatccagccatttcccaaattaccccaacaaccacacttacctatttcctcctcctcctcctcgccaccaccactaccatcaccccaattttagccataaccaacctaacagccctcctctcctccttccctgacttctcctccttcacttccctccttgcttccacaccctctataacctcagacctctccaaccgctctgctctcactctcttagtcatcccaaattcttacctttcctcctctttagacttcacgcgccgcctctctccttcttccctcaccgacctccttcgttaccacatcctcctccaatacctctcttcctccgacctccaccaacttcccccagctggggccctcatcaccaccctcttccaaacaaccggccgtgcctcctccaactttggctctgttaacataactcgaaacccagtaacaaacgcaatcactatttcctctccatcccctttttcctcctcaaacgccacggttttgtccctgataaagactcttccttacaatgtttcaataatttcagtgaattctcttttagtcccatatgggtttgatttgatggcatcagaaacaaggcccacattgggtttgaatattactaaagcattacttgatggccgcagtttttttgtcgcagcatctttgttatctgcttctggtgttgtagaggaattcgaagccgatgaaggaggagctggaataactctttttgtgcctactgattctgcattttcagatctgtcggaaactgatgttagtttacagtcattgccagctgataagaaagctgatgtcttgaaattccatgtcttacattcttattaccctctgggttcattggagtctattgttaatcctgtgcagcctacattggctactgaagatatgggtgctggcagttttactttaaatatttcgagggctaatgggtcggttgcgattgattcagggattgttctggcgtctgttacgcagacggtttttgatcagaaccctgttgcaatttttggggtttcaaaagtgcttttgcctaaagagatttttgggaggaatccagtgttgactagtaagccagggaattctgatatgggaaatgcactgccgcctgctgttgctttgtcgccagagagttcgccgaaaatgttgtcctctgcaccgggtgttagagaagagaagtctggagttggagggttacagcggttcagtactctacctttgctttgtgctcttgttgtatggtattgtatttagtggtattttgcacttcataatcaatgaattcttttccttttttgggggggttttgtacacggttattgacttgaattggg

SEQ ID NO: 342 - protein, 269 aa, Populus trichocarpa
MRPQSFILALSLIFFFLHCTKTLCQSPAAAPAMAPPKTPVKAPPADSSQAPSAQVATSPGPVDVNKILQKAGHFTVFARLMQATTEDTELNKELNTTNNGITILAPTDNAFSSLKAGFLNSLSDEDKTELVKFHVLPAFISTSQFQTVSNPVRTQAGTGPRVTLNVTTTGNFVNISSGLTNTSISGTVYTDSQLAIYQLDKVLFPLDIFTPKPPAPAPEPALGKPRKAAPDAESPTAPKDISGAPALLFLHNNALLLAVSCAFGAIIHS

SEQ ID NO: 343 - DNA, 902 bp, Populus trichocarpa
tagagaattttgttaagaagaaaaaaaaacatggagttttccatgattattatgtttagtagcacgctgttgtttttgtgcactccagtagcatatgctcaaacggcagctagtcctccagcaccaaccccaactccgtcctcatcaccagcaccagcaccaacacctccttacgttagcctcactgatttgctctctgttgctggcccattccacaccttccttagctaccttgaatccactaaggtcgttgacaccttccaaaaccaagccaacaacactgatgaaggcattaccatcttcgtaccaaaagatgatgccttcaaaaatcttaagaagccttctttgtcaaacctaactcaagaccaggtgaagcaactcattcttttccatgccttgccgcactattacgccttggctgatttcaagaaccttagccaagtaagccctgttagcacatttgctggtgcaggcggatatgctttgaatttcacagatgtatctgggaccgtgcaccttgattcaggatggtcaaaaaccaaagttagcagtagtgtgcattcaactgatcccgttgcagtttatcaagttgacaaagtcctccttcctgaggcgatatttggtgctgatatacctccagccccagccccagccccagcccctgaaaccagccttgctgcagattctccatcatctgacagtactggagatgggagcgctccaggaacttcccctccaaattcttcttataggatctttggtgtagatatttggagtcaattggttttggcactcataggtgtgctggtcctgttcttgtaggagaggatttccctgatgtgtattattccatgtgaagaggctatatctggattttgccatttgcttcgatttaaaaccat

SEQ ID NO: 344 - protein, 426 aa, Populus trichocarpa
MARINPAISQITPTTTLTYFLLLLLATTTTITPILAITNLTALLSSFPDFSSFTSLLASTPSITSDLSNRSALTLLVIPNSYLSSSLDFTRRLSPSSLTDLLRYHILLQYLSSSDLHQLPPAGALITTLFQTTGRASSNFGSVNITRNPVTNAITISSPSPFSSSNATVLSLIKTLPYNVSIISVNSLLVPYGFDLMASETRPTLGLNITKALLDGRSFFVAASLLSASGVVEEFEADEGGAGITLFVPTDSAFSDLSETDVSLQSLPADKKADVLKFHVLHSYYPLGSLESIVNPVQPTLATEDMGAGSFTLNISRANGSVAIDSGIVLASVTQTVFDQNPVAIFGVSKVLLPKEIFGRNPVLTSKPGNSDMGNALPPAVALSPESSPKMLSSAPGVREEKSGVGGLQRFSTLPLLCALVVWYCI

SEQ ID NO: 345 - DNA, 1085 bp, Populus trichocarpa
catcacctgatcatgaccagttttcaaaagatgtctctcaaatcctcttccctttttgctctttgtttctcctcctttcttctcttcaatactgtaagagcttctaacatcacccaaatcctcagccagtaccctgatttcagcaccttcagcagctatttgacacaaacccaacttgctggtgaaatcaacagccgccaaacgatcacggtcctagtggtggaaaatgggaacatgtctcctctctctggaaaaccaaacggtgagatcaagaatgtgttgagtgggcatgtaatactcgattactatgatgtagcaaagctgcaaaaattacaaaataaaactgctatgctcaccacccttttccagtccagtgggcaagccaaaggccaacaagggttcttgaatgtcacggttttgggttctaattcagttgcctttggatcagcagttccaggatccagccttagttcaaatttggttaaatctgtttcctctcaaccctataatatttcagtcttgcaggttagcaatatcattgtctcagcaggcacaggcaatgcaaattccaccacttcacctgttcctgtaggcccaccaaaaacttccccaacaccagcatcaagtccaaataagccaccatccacctcaaatcctccacccagtaaggcacctgcaccatccacagcaaaacctccacccactcatgcacctgccccatcaatggcgaagcctccagctgctagcgcaccatcagctaccccgcctgccatgtctatctcgcctgtgggaggaccttcaccaacaactgccgatggccctgctgcagattctccagctccatcccctccagcaatggatggtccaatagcagcaactcctgctgctgatggccctttggcagacgctcctttagaccccaaatctgatgcatctgtccttactactggaaataaccttgctttattggcactgattctactctcggcattttttctggcctagattacgttaatatgaagttagaaagattaatcaggttcttagtcctttggacttgctaaattgatggcaagttgcacgta

SEQ ID NO: 346 - protein, 263 aa, Populus trichocarpa
MEFSMIIMFSSTLLFLCTPVAYAQTAASPPAPTPTPSSSPAPAPTPPYVSLTDLLSVAGPFHTFLSYLESTKVVDTFQNQANNTDEGITIFVPKDDAFKNLKKPSLSNLTQDQVKQLILFHALPHYYALADFKNLSQVSPVSTFAGAGGYALNFTDVSGTVHLDSGWSKTKVSSSVHSTDPVAVYQVDKVLLPEAIFGADIPPAPAPAPAPETSLAADSPSSDSTGDGSAPGTSPPNSSYRIFGVDIWSQLVLALIGVLVLFL

SEQ ID NO: 347 - DNA, 1019 bp, Populus trichocarpa
gaaggctttggcttcatctttttggcaaagatggattccaaggcttcttctctcctcttcattgcattcttgtgcttaatctcaacttccacagccttcaacagcaccaagatccttgcacagtaccctgagtttgctaactttaatgatctcctcagccagagcgggctcgcccaggaaatgaacagccgccaaaccatcactgtccttgtgcttgataacggatcaatcgatggactctctggcagacccttagacattgcaaagaggatcttgagtgcacatgtaatccttgattactatgatcaaataaagctttcgaaacttcaaaaggccagcactatcgttaccaccttgtaccaagctagtggtgttgcagataatcgacaaggtttcctgaatattagcagaactgctgagggaatcaaattcggttcagcaatgaaaggtgctcctctcgttgcatcacttgtgaaatccatctactcgcagccttacaacatctcggtgctacaagtcagcgaacctattgagactccagggattgagaacatggctccaccaccaccacctggtactgctgccgttcccaagaaggcacctgctccagctccaagcactaaaacgccaccagctgcacctccaactgccaagactccagccaaatcccctgccaaatctccttccaaggctcctgcaccatccaaggagggaccatctacaccaactaaagcaccagccgaggggccagtggctgctgatgggccagtggctgctggtggcccagtagctgatgtgcccgcagagtccccagaggctgatacagaagtggctgaggaagcaccagctgtagcacctgcaaaagctgcttcttcacgtatgcatgttgctggtgcaaccgtggttatcggattgtttgcctgcataatgggtttttaaaaggcaagcaatagaacaaggcagaacaaaaaccgggtaaaaaaatggagtgaatgggaactggatagtacgaggctagc

SEQ ID NO: 348 - protein, 330 aa, Populus trichocarpa
MTSFQKMSLKSSSLFALCFSSFLLFNTVRASNITQILSQYPDFSTFSSYLTQTQLAGEINSRQTITVLVVENGNMSPLSGKPNGEIKNVLSGHVILDYYDVAKLQKLQNKTAMLTTLFQSSGQAKGQQGFLNVTVLGSNSVAFGSAVPGSSLSSNLVKSVSSQPYNISVLQVSNIIVSAGTGNANSTTSPVPVGPPKTSPTPASSPNKPPSTSNPPPSKAPAPSTAKPPPTHAPAPSMAKPPAASAPSATPPAMSISPVGGPSPTTADGPAADSPAPSPPAMDGPIAATPAADGPLADAPLDPKSDASVLTTGNNLALLALILLSAFFLA

SEQ ID NO: 349 - DNA, 830 bp, Populus trichocarpa
cacactcaagatttgaaatatcctacaacgatgagaaagcaacttctctccccattcgttcctttcttgatgttcttcctctacagctccaccacttttgctcaaaccccatctccagcaccttcaggtccaaccaacataacggcgatccttgcgaaagctggtcagttcacaaccttaattcggttgttgaaaagcacccaagaggctgaccaaatcaacacacaactcaacaattcaaaccaaggcctaacagtctttgcaccaactgataattcctttgctaacctcaaagcaggtacactgaattcgctcagcgaccaacaaaaggtccaattggtgcaatttcacatccttccaaatttcctttccatgtcaaacttccaaactgtcagcaatcccttgcgcactcaagccggaaatagtgctgatggcgagttcccgctcaatgtgacaacatcggggaatcaagtgaacataacaacaggggttaatactgcaaccgtggcaaacactatatacaccgatggccagttagttgtgtatcaggtggatcaggtccttctgccgttggatctttttggtacagcaccagcaccagctcctgcaccttcaaagcccgagaaagatgttccagcaaaagctcctgcagggtccaaggaagatgcatctgttgatagttcaggtgcatccattgcaacagtatccttcggtgttgtgctgatcgcagcaatttcattgaagctatgagtttttgtttttggacattgttgaggagttattgttttatcgttctgttgtggtttgaactgagttggattattctttgg

SEQ ID NO: 350 - protein, 302 aa, Populus trichocarpa
MDSKASSLLFIAFLCLISTSTAFNSTKILAQYPEFANFNDLLSQSGLAQEMNSRQTITVLVLDNGSIDGLSGRPLDIAKRILSAHVILDYYDQIKLSKLQKASTIVTTLYQASGVADNRQGFLNISRTAEGIKFGSAMKGAPLVASLVKSIYSQPYNISVLQVSEPIETPGIENMAPPPPPGTAAVPKKAPAPAPSTKTPPAAPPTAKTPAKSPAKSPSKAPAPSKEGPSTPTKAPAEGPVAADGPVAAGGPVADVPAESPEADTEVAEEAPAVAPAKAASSRMHVAGATVVIGLFACIMGF

SEQ ID NO: 351 - DNA, 899 bp, Populus trichocarpa
gttcttgcagggatttagagaagataaaccatgaagttttctatgattattgtgcttagcagcacactgctgttttcgtgcactccactagcatatgctcaaaaagtagctagtcctccagcaccaaccccaactccatccccagcaccagcaccatcacctccttacgttaacctcactgatttactctctgttgctggcccattccacaacttccttaactaccttgagtccactaaagtcattgacacctttcaaaaccaagccaacaacactgatgaaggcattaccatcttcgtaccaaaagatgatgccttcaaaaatctcaagaaggcttctttgtcaaacctaactcaagaccagctcaagcaactcattctttttcatgccttgccacattattactcgttgtctgatttcaagaaccttagccaagtgagccctgtcagcacatttgctggtgcaggaggatatgctttgaatttcaccgatacatctgggaccgtgcaccttgattcaggatggtctaaaactaaagttagtagtagtgtgcattcaactgatcctgttgcaatctatcaagttgacaaagtcctccttcctgaggcaatctttggtactaatatacctccaaccccagctccagcaccagctcctgacactagccctactgcagattccccaacatctgacgactcagcaggagcagggagcgccccaggaaagtcccccccaaattcttcttataggatcaatggtgtaggtatttggagtcaattggttctagctattgcaggtgtgctggtcctgtttttgtaaggcaggatttcattgttgtgtattaatttatgagaagagggtatatctggattatgtcatttgttttgatttaaaaccat

SEQ ID NO: 352 - protein, 239 aa, Populus trichocarpa
MRKQLLSPFVPFLMFFLYSSTTFAQTPSPAPSGPTNITAILAKAGQFTTLIRLLKSTQEADQINTQLNNSNQGLTVFAPTDNSFANLKAGTLNSLSDQQKVQLVQFHILPNFLSMSNFQTVSNPLRTQAGNSADGEFPLNVTTSGNQVNITTGVNTATVANTIYTDGQLVVYQVDQVLLPLDLFGTAPAPAPAPSKPEKDVPAKAPAGSKEDASVDSSGASIATVSFGVVLIAAISLKL

SEQ ID NO: 353 - DNA, 1304 bp, Populus trichocarpa
ctccacagtccactcctctccaccaccacaatgccacgcccactacctctcctcactctcgccatatctctagtcctccttgcctccaccacaactgtaaatgcacacaacatcacacgcatactagccaaacaccctcaattctccaccttcaaccactacctcacagtcacccacctcgccgcagaaatcaatcgccgccagaccattactgtcctcgctctcgacaatgctgccatgtcatctttaatatccaagcagctctctgtttacactctaaggaatgttctctctttacacgttcttgttgattactttggtaccaggaaactccaccagattactaatggtactgaattgactgccaccatgttccaagccactggttcagcccctggcgcctcaggttatgtcaatattactgatcttaacggtggtaaagtggcatttggcgctgaagataacgatggaaagcttaatgctgtttatgtcaagtctctcgaagagattccatataacatatccattttacaaatcagtcagcctctgaattcagcagaagcagaagcaccgacggcggcgccaacactgaatgtaacagccattttgtcgaatcaaggttgtaaagcgttctccgacttgttgatagcttctggggcacacaccacattcgaggaaaacgttgacggaggattaactgtattttgccccaccgaccccgttatcaatggcttcatgcccaagtacaagaacttgacagctcctcaaaaagtgtcgttactgttatatcacggtatcccaatttaccagtcactccaaatgctaaaaaccagcaacgggattatgaacacgttggccacaaacggtgccaacaagtacgatttcacagtccaaaatgatggggaggtggtgacgttggagacgaaagttacgaccgcgacgataacggggacggtaaaagatgaggagccgttggtggtgtataagattaataaagtcttgttgcccagggagttgtttaaggcggctccggagaaaaaagcaccggcgcctaagggggagaaggatgtggcggatggacctaatgctgatgcgccgtcagatgaatcggatgatcaaacggcagataatgataacggggtcaataaaatgggcggtgggagattggctgttgtagccccgagtttcttttttggggtggtgatgttttttttatttgattaattttattttttagcttgattaagattgagatattggagtacagtgtatggacagcaaatgaagatggagccatcgataca

SEQ ID NO: 354 - protein, 262 aa, Populus trichocarpa
MKFSMIIVLSSTLLFSCTPLAYAQKVASPPAPTPTPSPAPAPSPPYVNLTDLLSVAGPFHNFLNYLESTKVIDTFQNQANNTDEGITIFVPKDDAFKNLKKASLSNLTQDQLKQLILFHALPHYYSLSDFKNLSQVSPVSTFAGAGGYALNFTDTSGTVHLDSGWSKTKVSSSVHSTDPVAIYQVDKVLLPEAIFGTNIPPTPAPAPAPDTSPTADSPTSDDSAGAGSAPGKSPPNSSYRINGVGIWSQLVLAIAGVLVLFL

SEQ ID NO: 355 - DNA, 926 bp, Populus trichocarpa
ggaagggtttggcagcatcctttcacaaagatggatttcaaggtctcttccctcctcttcattgcaatcttgtgcttaatctcctcaacctccacggccttcaacatcaccaagatccttgcacaataccctgagtttgttagcttcaatgatctcctaacccaaagcgggctcgccaaggaaatgagcagccgagaaaccatcactgtgcttgctctcgataatagctcgattggtgggctctctggaagacccttggacattgccaagaggatcttgagtgcgcatgtaattcttgattactatgatcaaataaagctttcaaaacttaaaaaggccagcactatcgtcaccaccttgtaccaagctagtggcgctgcagatgatcgacaaggtttcttgaatattagcagaactgctgagggaatcaaattcggttcagcagtgaaaggtgctcctctcgtcgcatcacttgtcaaacccgtgtacgcacagccttataacatttcggtgctccaagtcagcgaacctattgaggctccagggattgagaacaatgctcctccaccaccacctgctgccgttcccaagaaggcaccagctccaactgccaaatctccttccaaggctcctgcaccatccaaggtggaaccatccactccaactgaatcaccgaccgaggggccagtggctgctgatggaccagtagctgatgtacccacagcctctccattggctgatgcaccaatggcagatgaaacaactgctgaagctgcttcttcacaaatgcatgctggtggtgccgtcgtggtgataggattgttggcctgcatgatgggtttttgaaaggcaagcaatagaacaaggcagaagaaaaactaggtaaaagaatggagaaaaccgaagctggatagcatggaagttag

SEQ ID NO: 356 - protein, 271 aa, Populus trichocarpa
MDFKVSSLLFIAILCLISSTSTAFNITKILAQYPEFVSFNDLLTQSGLAKEMSSRETITVLALDNSSIGGLSGRPLDIAKRILSAHVILDYYDQIKLSKLKKASTIVTTLYQASGAADDRQGFLNISRTAEGIKFGSAVKGAPLVASLVKPVYAQPYNISVLQVSEPIEAPGIENNAPPPPPAAVPKKAPAPTAKSPSKAPAPSKVEPSTPTESPTEGPVAADGPVADVPTASPLADAPMADETTAEAASSQMHAGGAVVVIGLLACMMGF

SEQ ID NO: 357 - DNA, 1429 bp, Solanum lycopersicum
atttattgctacacactgtccactattgttgtctcacacacattgtgtttactctctctctgcttctctttcttctctctttagcaataatgcagctccggtcaatgaccgccgtggccatggtggtcttctctttaggtcttttgctttcaccacatacaacctcagctcacaatatcacacatattttagcaaaatacccacaattttccactttcaaccattacttaactgaaacccatctcgccgccgagattaacagccgggaaaccataactgtctgcgccgtcgacaacgccggcatggaggagcttctctctaagcatctctccatttacactatcaaaaacgtcatttcacttcacgtacttttagattacttcggtgcgaagaaacttcatcaaatcactaatggcactgcgttagctgcaactatgtttcaggcaaccggttcagctcctggttcgactgggtttgttaacattacagatctgaaaggtgggaaagttggatttgggccggcggagaatcatggtaatcttccggctacttttgttaaatctgttgaggagataccgtataatatatctgttatacagattagtacgatgctgccgtctgcttcagctgaagctccgacgccggaaccgagtcagatgaatctgacttcgctaatgtcggctcatgggtgtagggtttttgctgaaacattgttgaaatctcctgctgagaagacttttgatgagaacgctgatggtgggttaacggtgttttgtcctggagatgatgcgatgaagaattttatgcctaagtttaagaatctgactgccgacgggaagcaatcgttgcttgagtatcatggggttccggtatatcaatctatggcgagcttgaaatcgaacaatggcgtgatgaatactttagctactgatggagctaagaagtatgacttcgttgttcaaaatgacggcgatacagtgacattgaagacgaagattgtgacggcgaagatcaccggaactcttattgatgaacagcctattgctattttcactattaataaagttctaatgcctaaggaactattcaaggcttcagctgccgcagatactccggcgccggcaccggcaccggatgccgattcacctgaaccatctaaaaagaagaagaaacacaaggcgccggcggcagctgatactccggcggactcaccggcggatggtcccagtgacgattttgcagattcaacggcggatgataacagtgcgtatagttacagtgctggaccagtggttgccggagttttgagtatgtggtttttctttttattgctttgagtttttttattcattttatatgattataatttaaaaggacttttatcgttaaataattattgattatttatggtatcaaacttgttattttg

SEQ ID NO: 358 - protein, 265 aa, Solanum lycopersicum
MSRSTFPLLCSFLILFASSASAFNITKILGQYSDYSTFNELLSKSGLASDINSRGTITLLAIPNGAVGDLTSKSDDVLKRVLATHVVLDYYDPMKLQKMKDKTAKMTTMFQQSGKAAYDQGFLNVTAKDGSFVFGSAVVGAQRDSKLEKSVMNQPYNISILGISQPIVTPGLDGTMAPISAPPPKALTPKKSPVAEAPQEAEAPAEEEAEAPAEEAEAPAPSQDAPSSAPDADTPPADQAPPPSSATKLSVSFGLFVVLATIVVV

SEQ ID NO: 359 - DNA, 981 bp, Solanum lycopersicum
ggttgagctttctcttaataaacaataaatctctcatttttgctggtttttttttaaaaaaatcgaaaaaaaaacaccagcaaaaatgagtcgctcaacttttcctttgctatgttcattcttaatcttgttcgcgtcctctgcctcagcctttaatatcacaaaaatcctcggtcaatattccgattacagtacattcaatgaacttttatcgaaatctggcttagctagtgatattaattcgaggggtacaattacacttttagctataccaaatggtgcagttggtgatctcacatcgaaatcagatgatgttcttaagagagtgttggctacacacgtcgtattggattactacgatccaatgaaacttcagaagatgaaggacaaaacagcgaaaatgacaacaatgtttcaacaatctggtaaagcagcgtatgatcaaggtttcctaaatgttactgctaaagatggtagtttcgtgtttggttcagctgtagttggtgctcaaagagattcaaaacttgagaaatccgttatgaatcagccttacaatatctcgattcttggaatttctcaacctattgttacgcctggtctcgatgggacaatggcaccgatttcagccccaccaccaaaggcactcacgcctaaaaaatcaccagtagcagaggcccctcaagaagcagaggcccccgctgaggaagaagcagaggcccccgctgaagaagcagaggcccctgctccttctcaggacgcaccgtcatctgcacctgacgctgacacacctcccgctgatcaggccccaccaccatcatctgctacaaaattgtcagtttcctttggtttatttgttgttttggcaacgatcgtcgttgtataatttaaatttctgaatcagggatcgtttgagttgtatcatcaaaaaaaaaaaaatctcaatatttttaatatggcttaataaaatcataattgtaagtg

SEQ ID NO: 360 - protein, 414 aa, Solanum lycopersicum
MTTLHFFLFTLLTVSVHAHNITEILNKFPEYSVFNSYLSQTKLADEINSRETITVLALPNGAMSAIVDKHPLSVIKNVLSLHVLLDYFDGTKLHKISDGTTTSTTLYQTTGNAHGNIGSVNITDLKGGKVGFGSAIPNSPLASTYTKSVKQIQYNISVLEVSAPIIAPGILTAPAPSGDFNITGALEKAGCKTFASLLVKSGVLKTYQTAIEKGLTIFAPNDEAFKGAKVPDLSDLSSADVVSLLQYHAIPSYTPIGTLKTTKDPISTLATNGASKYDLAVSTEGDQVTLDTGVDSSRIASTVIDSTPFCIFTVDSVLLPVELYGKAPSPAPGPAPETSPTPAPAPAPEASSPTPMMSPPAPPTSSPAGSPADSPTADSENSTAKKNAGNVNTPALLKALLTVSVSVIVSVYLS

SEQ ID NO: 361 - DNA, 1911 bp, Solanum lycopersicum
  misc_feature (1827)..(1827): n is a, c, g, or t
  misc_feature (1841)..(1841): n is a, c, g, or t
  misc_feature (1845)..(1845): n is a, c, g, or t
  misc_feature (1860)..(1860): n is a, c, g, or t
  misc_feature (1870)..(1873): n is a, c, g, or t
  misc_feature (1876)..(1876): n is a, c, g, or t
  misc_feature (1891)..(1891): n is a, c, g, or t
  misc_feature (1894)..(1894): n is a, c, g, or t
  misc_feature (1902)..(1902): n is a, c, g, or t
  misc_feature (1906)..(1906): n is a, c, g, or t
ggtagaaaaataaaaggaaaaaagaatcttaaattactcagctccagccagctttgaaaactttgattttcctttaaatacacacaaaaaaaagatcaacagatctgcagaattatcatttttcttctccatagaactaatcttccaaaagggtagtcgctgagagcttggaggtccaatggcgattggtatgaagcagatgtctatgataatagcaacccttggtgttttatcctttatatttggagttatagctgaaaacaagaagcctgcagctgggactgcaatatcaggaaaaggcgttgttatttgtaaatacaagtctgatcctactgttgccttgggctattgtcttttgtttttcttgctgcatcttctgtggccggttttctgtctttgttttatccgtatcaaggaaagtcagttccacaagctgctttgctgagaaacactagtttcctcgtgttcttaaatattgcattgggcacaactggtttagcagcaacattgttgttgtggcctacaatcaccgagcaacttcatatcacacgcaacattcatcacaacttgcagaccgatcgcccaactgccaagaccggtcttctaggtggaggtgccttcttgtctcttgattccgcgctcttctggttggtggctttgatgttggctgataacgctcgtgaggattatttccaagaaacggatatcaagggcgagccgaaagcaagttatgcagatgatgaaattatcaagaccagtgcttaagcctttctactctctctttgttatatgtgttgttgcaaaatgaactttcagcacaaactgtaaaaaaaacatgttttcctgcctttctaagtataataaaatatatggattgtttgcaaaaaaaaaaaaaaaaaaactcggccacacttactctttactaaacaacaagccacagtttccattttccgtctgccggagaaaaatgaagctccgatcagcagcaacaactctgattattattctctttgccgctattctgccatgtcacagtcagatcagtaaaaccaagccgtcgctatctgcaaaaggagaagcaccagctgcagcaatcagtatcatatctctaatgtcagctcatggatgtaaaagttttgcagatacactatcaggttcaccggctgagaagacattcgaggacaatgtagaaggaggtgtaacaatattttgtccaacagacgatgcaatgaaatcgttttcacctaaattcaaaaatttaacagcggatggaaaacaatcagttctcgaatatcatggagttccggtttatcaatcgatgtcgagtttgagaacgagtaatggtttgatgaacactttagctactgatggagctaataactacgatttcgttgttcaaaatgacggacaagatgtgacattgaagactaaaatagttacagggaaaatcactggaactgtatttgataaagagccagttgcgattttctcgattgatgaagttttagagccaatcgaattgttcaaattagctccaactcctgcaccagcaccagcaccgacacctgaagcagatgccgagtctccgaaaccggccgggaagaaacacaagtcaccaccagcgccggcttctccggcggattctccggttgctagtcgcaaaggcaaagttgctgattcgacggcggataagaacggtgggtttagattcaacggcggagctatggtaacccctgttttgttcatttggtttgcccatttgttactgtaatttttattttttattttagatttggtgttatgttttagatctgaaataagtttggncaaaataaaatggntctnaattgtaacttttgnaattgtagtnnnntgntttacagtttctttnatngtttgtgnttcnttgat

SEQ ID NO: 362 - protein, 411 aa, Solanum lycopersicum
MQLPSSATVAAVVLSVVLFICATEAHNITHILADHKQFSTFNHYLTTTHLAAEINRRQTITVCAVDNAGMSDLLSKQLSIYTIKNVLSFHVLLDYFDAKKLHQITNGTALAATMFQATGSATGSSGFVNITDLRGGKVGLSPADYNGPPPAKFVKSIAEIPYNISVIQISTILPSDEAEAPTPGPSQMNLTSLMSAKGCKVFAETLLASPAEKTFEDNVDGGVTIFCPRDDAMKKFLPKFKNLTAEGKQSLLEYHGIPIYQSISNLKSNNGDMNTLATDGAKKYAVVIQNDGEDVTIKTKIVTAKITATVVDKLPLAIYSLDKVLLPEELFKASPTPAPAPAPEARAESPKHSKSPPAPASPAESPADSPADGPNGDADDLTDSGAVKYNAGASLAAVFSLWFAFNVLMEV

SEQ ID NO: 363 - DNA, 1512 bp, Solanum lycopersicum
gatacaccatgactaccctacacttcttcctcttcactctccttaccgtttccgttcatgcacacaacatcactgaaattttgaacaagttcccggagtacagtgtattcaacagttatctctcacaaactaaactcgccgacgagattaacagccgtgaaactattaccgttttagctttgcctaatggagctatgtctgctatagtcgacaaacatccactttccgtcatcaaaaatgtcctctctcttcatgttttgcttgattactttgacggtactaaacttcataagatctccgacggtactacgacttccactactctttaccaaactaccggcaatgctcatggaaacataggttctgttaacattaccgatcttaaaggtggtaaagtaggttttggttcagctattccgaactcaccattggcgtctacatatactaaatctgtgaagcaaatccagtataatatctctgtgttggaagttagtgctccgattattgctccgggtattttgacggcaccggcgccatctggtgattttaatattactggtgcattggagaaagctgggtgtaaaacatttgcttcattacttgtcaaatctggagttctcaagacgtatcaaactgctattgagaagggtttgactatttttgccccaaatgatgaggcgtttaagggagctaaagttccagatctgagcgatctcagtagcgctgatgttgtttcgttgttgcagtaccatgctattccgagttacactcctattggaaccttgaaaacgacgaaggatccgatttcaactctagctactaatggcgctagcaagtatgatctggcagtttcaacagaaggtgaccaggtgacacttgacacaggtgtcgattcgtccagaatcgcttccacagtcattgactctactcccttctgcattttcaccgtcgacagtgtgcttctacctgtggaattgtacggaaaagctccatccccagcaccaggaccagctccggagacttctccaacaccagcaccagcccctgctccggaagccagctctcctactccaatgatgtctcctcctgctccaccgacttcatctccagctggttctccggcggatagtcccactgcagattcggagaacagtacggcgaagaagaacgccggtaacgttaacactccggcgctactgaaagctctactcacagtgtcagtttcggtaattgtgtccgtttatttgtcctaaaccgccattttccgtttgtttaattaaatttgggtttttggagtcatatttttatttgtgacttgcttgtagagacgatttttatttaatttcatttaatttttaaatgtcctttaatagtgagtgagccgtttatctgagtaaagggcactgttttttcttttcttttcttttgttctgttgctgtactttgtttttattttaaatcctttgtcttatttttggtgtataataatgttccacttgttgagttattatc

SEQ ID NO: 364 - protein, 415 aa, Solanum lycopersicum
MQLRSMTAVAMVVFSLGLLLSPHTTSAHNITHILAKYPQFSTFNHYLTETHLAAEINSRETITVCAVDNAGMEELLSKHLSIYTIKNVISLHVLLDYFGAKKLHQITNGTALAATMFQATGSAPGSTGFVNITDLKGGKVGFGPAENHGNLPATFVKSVEEIPYNISVIQISTMLPSASAEAPTPEPSQMNLTSLMSAHGCRVFAETLLKSPAEKTFDENADGGLTVFCPGDDAMKNFMPKFKNLTADGKQSLLEYHGVPVYQSMASLKSNNGVMNTLATDGAKKYDFVVQNDGDTVTLKTKIVTAKITGTLIDEQPIAIFTINKVLMPKELFKASAAADTPAPAPAPDADSPEPSKKKKKHKAPAAADTPADSPADGPSDDFADSTADDNSAYSYSAGPVVAGVLSMWFFFLLL

SEQ ID NO: 365 - DNA, 1502 bp, Solanum lycopersicum
gagtcacttgagatctcacttgccccaataacaactccttgaatttcacacagtcaccggagttcttctttctcttacaacaccgacatgcagcttccgtcgtcggccaccgtggctgcggtggttctctccgtagtcctttttatttgtgccactgaagctcataacattactcacattctagccgaccataaacagttctccactttcaaccattacttaacaactacacacctcgccgctgaaattaaccgccggcaaaccatcactgtttgtgctgtagataatgccggaatgtcagatctactctccaaacaactatctatctacactataaaaaacgttctctcttttcacgtgcttctcgattacttcgacgctaaaaagcttcaccagattactaacggcacggcacttgccgccacaatgtttcaagctaccggctcagctaccggatcttctggattcgtaaacattactgatctaagaggaggtaaagtcgggctcagtccggctgattacaacggtcctcctccggctaaatttgtaaaatcaatcgccgagattccttacaacatctccgttattcaaataagtacgattttaccctcagacgaagctgaagctccgactccaggaccaagccaaatgaatctcacttctctaatgtcagctaaaggctgcaaagttttcgccgagactctattagcttctccggctgaaaaaacgtttgaggataacgttgatggcggagtaacaatattttgtccacgagatgatgcaatgaagaaatttttgcctaaatttaagaatttaacagcggaagggaagcaatcactgctcgaatatcatggaattcctatataccaatcgatttcgaatttgaaatcgaataatggagatatgaacactttagctactgacggagctaagaagtacgctgtagtcattcaaaatgacggtgaagatgttactataaaaacgaaaattgtgacggcgaagatcacggctactgtggttgataaactgccattagcgatttactcgcttgataaggtgttattacccgaggaattgttcaaggctagtcctactccggcgccggcgccggcaccggaggcacgtgctgaatctcctaagcactccaagtcaccaccggcacctgcatctccggctgagtctccagcggattctccggcggatggtcccaacggtgatgctgatgatttgacagatagcggtgctgttaagtacaatgccggagcatcacttgccgccgttttcagtttatggtttgccttcaacgtgttgatggaagtttgaaaaagaatttcatcaaattaaagttagttactgtattattagtctatttctcagtttttagatttacttctttgattctatttggaattttcattaatgtaatatgaatcattattgacttttcaaccattaattattatatgaaaaattacgcgattgagtagatttatcctcggcaa

SEQ ID NO: 366 - protein, 311 aa, Solanum lycopersicum
MFSCLSKYNKIYGLFAKKKKKKLGHTYSLLNNKPQFPFSVCRRKMKLRSAATTLIIILFAAILPCHSQISKTKPSLSAKGEAPAAAISIISLMSAHGCKSFADTLSGSPAEKTFEDNVEGGVTIFCPTDDAMKSFSPKFKNLTADGKQSVLEYHGVPVYQSMSSLRTSNGLMNTLATDGANNYDFVVQNDGQDVTLKTKIVTGKITGTVFDKEPVAIFSIDEVLEPIELFKLAPTPAPAPAPTPEADAESPKPAGKKHKSPPAPASPADSPVASRKGKVADSTADKNGGFRFNGGAMVTPVLFIWFAHLLL

SEQ ID NO: 367 - DNA, 1437 bp, Solanum lycopersicum
gctataactcttttttcaacctctttctcctctttgaaagaacaaatctccatctctctactctcgccggcaaaaatgaaggtctcgccggcggtaccactttccgtcactcttcttctcttcctatttctctccaccaccacatacgctcacaacatcactaaaatcctcgcaaaacaccctgaattctccaccttcaaccattacttaactgttacacacttagctgctgaaatcaaccgccgacagaccatcactgtctgcgcaattgacaatgccgccatgaatgttctccttgaaaaacacctccctacttatactctcaaaaacgttctttctctccacgtattcgccgattacttcggcgccaaaaaactccatcaaatcactaaaggaagtaccctcaccgccacaatgttccaagctaccggcgaagctccgggaacttcagggtacatcaatatcacaaatatgaaaggtgggaaagtaggtttcgccaatgaagacaacgacggccatttcgctgctactttcgttaaatccgtcgtggaaatgccgtacaacatctccgttattcaaatcagtcatattctcacttccgccgctgctgaagctccggtagctgctccaagtgaccttaacgtcactacattaatggcgaaacaaggatgtaaatcattctcagatctgttgaaatctcacccagatgtagccaaaaccttcgctgaaaatgtacagagtgggttaacagtgttctgccccaccgacggcgtaatcaccgcctttatgcccaaattcaaaaacctaaccaaagacgggcaagcttcattactactgtaccatggaatccctgtttacaattccatggggatgttgaaatccaacaacggattaatgaacactttagctaccgaaggtaaaaaaaaatacgatttcaccgtacaaaacgacggagacgatgtgaaattggaaaccaaagttgttacagcaaccatctccggtacattatacgacgaagagccgttatccgtttacaaagtcgataaagttttactccccagagaattattcaaaggaactgtagctgaagagccagctccagctccgaaaggtgcaaagaaaaagaagaagagcagcaagggaggagacgatgatgttgacgacgacggtgcaccggagcccagccaggacgacgatgaagatccggcggatgattcagcaaatttgaacttcgcaaatcatgtgaagagtagtggattgtttgttacagttgtaattagcattatttgtgttgccattatttgataataatggaaccataatgttattttggcttgcacatagatatattttctttttttaaaaaattgttttttgaaagagtttttttttttggtatttaattttgattgtgttgtgcaatttcattttttttat

SEQ ID NO: 368 - protein, 409 aa, Solanum lycopersicum
MKVSPAVPLSVTLLLFLFLSTTTYAHNITKILAKHPEFSTFNHYLTVTHLAAEINRRQTITVCAIDNAAMNVLLEKHLPTYTLKNVLSLHVFADYFGAKKLHQITKGSTLTATMFQATGEAPGTSGYINITNMKGGKVGFANEDNDGHFAATFVKSVVEMPYNISVIQISHILTSAAAEAPVAAPSDLNVTTLMAKQGCKSFSDLLKSHPDVAKTFAENVQSGLTVFCPTDGVITAFMPKFKNLTKDGQASLLLYHGIPVYNSMGMLKSNNGLMNTLATEGKKKYDFTVQNDGDDVKLETKVVTATISGTLYDEEPLSVYKVDKVLLPRELFKGTVAEEPAPAPKGAKKKKKSSKGGDDDVDDDGAPEPSQDDDEDPADDSANLNFANHVKSSGLFVTVVISIICVAII

SEQ ID NO: 369 - DNA, 949 bp, Arabidopsis thaliana
cgacatcttctaagaaagaaacaaagaaagacttcacattttaccattatttgctctgagctcagtaggagagttcaagaaacaatggcaaagatgcaattatcaatctttatcgctgtcgttgcgcttatcgtctgctctgcatctgctaaaaccgcaagccctccagctccagtgctgccaccgacaccagctccagcaccagccccggaaaatgtgaatctcaccgagcttttaagtgtagctggtccgttccacacattcctcgactaccttctctcgactggagtcattgagactttccaaaaccaagctaacaacactgaggaaggcatcacaatctttgtccctaaagatgatgctttcaaagctcagaagaatcctcctttgtcaaatctcacaaaggatcagcttaagcagcttgttctcttccatgctctgcctcattactattcgctttcggaattcaagaacttgagccaatctggtccagtgagcacctttgctggtggtcaatactccttgaaattcactgatgtttctggcacggttaggattgattctttatggaccaggactaaagtcagcagcagtgttttctccactgaccctgttgcggtttaccaagtgaaccgcgtgcttctacccgaagcaatctttggtactgatgtccctccaatgcctgctccagctcctgctcctatcgttagtgctccttcggattctccttcagttgctgattctgaaggagcttcttcaccaaagtcctcacacaagaactccggacaaaagctgctacttgcaccaatctccatggttatttccggtttggtggcattgttcttgtgatcagatggttttgcagattgagttatgtttttaagttacaatgtgaaagattgtattacatcatttgaattgtctttttgatttttgaaacccatttttt

SEQ ID NO: 370 - protein, 486 aa, Arabidopsis thaliana
MPLLLQLQQLHRARQAKLSCGAPPPYLSDSARASPPAHHRTSSSECSVRSTPLRAKQRTARRRRSLSLSVDMELLLRRLAVVVAVVALTAATAAEGYNITKILGDHPEYSQFNKLLTETRLAGDINRRRTITVLVVANGDMGALSGGHYTLPTLRHILEMHILVDYYGAKKLHQLARGDTASSSMFQESGSAPGTTGYVNITQHRGGRVSFTAEDAADSATPSSFVKSVKEIPYDLAVLQISKPLSSPEAEAPVAPPAPVNLTELLSKKYCKNFAGLLASNADVYSNINATKDNGLTLFCPVDAAVDAFLPKYKNLTAKGKAAILLYHAVPDYYSLQLLKSNSGKVSTLATASVAKKDYSYDVSNDRDSVLLDTKVNSASVTATVKDADPLAVYAISKFLQPKELFKVTEDLAPAPAPEGPKKKTKKKKPSTTSAAAAPSDDSSAADSPDGTPADDVADKAAAAPSVLARWVTAAATVAAALALAA

SEQ ID NO: 371 - DNA, 1539 bp, Oryza sativa
acccctcctctcaggctctcactcgcgctgcatgccacactgcttcttcttcttctctctctctagctagctagctagcttctctgtaggctgtagctgcggtggcaatggcggcggcgaggttgtgggtggttgcggtggcggtggcggtggcggtggcagtgatggcggcggcggtggaggggaagagctacaacatcacgaagatcctggcggcgcacccggagttctccaagttcaacgagatgctgagcaagacgaggctggcgtacgacataaaccggcggcagacgatcacggtgctggcggtggacaactcggcgatggcgtcgctggaccacttcaccctccccaccatccgccacatcctctccctccacatcctcgtcgactactacggctccaagaagctccacgccctctcccatggcgccaccgcctcctcctccatgttccaggcgacggggtcggcgccggggacgacggggtacgtgaacatcacgtcgcacaagggcgggaagatcgacttcatctcggaggacgcggacgagagcgcgaagccgtcgaggtacgtgaagtcggtgaaggagatcccctacgacatctccgtgctccaggtgagctccgtgctgtcctcctccgaggccgaggcgcccgtcccgccgccggcgccggtgaacctcaccgagctcctctccaagaagtactgcaagtccttcgccggcctcctcgccgccaacgccgacgtcttccgcgccgtcaacgagaccaaggacaacggcctcaccctcttctgccccgtcgacgccgccgtcgccgccttcatgccctcctacaagaacctcaccgccaaggccaagaccgccatcctcctctaccacgccgtcccggactacttctcgctgcagctcctcaagtccaacaatggcatggtcaccacgctcgccaccgccagcgagtccaagaaggactacagctacgacgtccagaataagggcgagaccgtcacgctcgacaccagggtcgtcaactccgccgtcaccgccaccgtcggcgacgccgagccgctcgccgtctacgccgtcaccaagttcctcaagcccaaggagctctacaaggtcgtcgaggcccccgcgcccgcgcccgagccgtccaagaagcacaagtcggcggccgacgacagcagcgacgactcgtcggacgattccggcgacgtcaaagcccacaagggcgccgccgctccggcgccgctcgcccggtgggtgaccgccgccgcggccgccgccgtagcagcattgatgctaatggcttgatgcatgagtcagtcaatctacactctacagagcagagtgtgtcgaatttgttttttttttttcctttttggtatggctggtcaattacaaataagaaacatagatgtgtgaatgatttgtagttctttgagttttttctttctttctgtggtggtttgatgtaattactttgtaattaatatagttgtccataatccacggaaaaagctaagaatgatttcatcat

SEQ ID NO: 372 - protein, 420 aa, Oryza sativa; identical to SEQ ID NO: 176

SEQ ID NO: 373 - DNA, 1644 bp, Oryza sativa
ttgcacaattgatgagcaatgcttttttataatgccaactttgtacaaaaaagcaggcttaaacaatgccactactactacaactacaacaactacatagagccaggcaggccaagctgagctgcggcgccccaccaccatacctctccgactccgcgcgagcatcgccaccagcccaccaccgcaccagtagtagtgagtgctcagtgcgttccactccactccgagctaagcagcgaacagctcgccgccgacgctctctctctctctctgtagatatggagctgctgctgcggcggctggcggtggtggtggcggtggtggcgttgacggcggcgacggcggcggaggggtacaacatcaccaagatcctcggggaccacccggagtactcgcagttcaacaagctgctgacagagacgcggctggccggcgacatcaaccgccgccgcaccatcacggtgctggtggtggccaacggcgacatgggcgcgctctccggcggccactacaccctccccacgctccgccacatcctcgagatgcacatcctcgtcgactactacggcgccaagaagctccaccagctcgcccgcggcgacaccgcctcctcctccatgttccaggagtccgggtcggcccccggcacgacggggtacgtgaacatcacgcagcaccgcggcgggcgcgtgtcgttcacggcggaggacgcggcggacagcgcgacgccgtcgagcttcgtcaagtccgtgaaggagatcccctacgacctcgccgtgctccagatcagcaagccgctgtcctcccctgaggcggaggcgcccgtggccccgccggcgccggtgaacctcaccgagctcctgtccaagaagtactgcaagaacttcgccggcctcctcgcctcgaacgccgacgtgtacagcaacatcaacgcgaccaaggacaacgggctcacgctcttctgccccgtggacgccgccgtcgacgccttcctgcccaagtacaagaacctgacggccaaggggaaggcggccatcctcctctaccacgccgtgccggactactactcgctccagctgctcaagtccaacagcggcaaggtcagcacgctcgccaccgccagcgtcgccaagaaggactacagctacgacgtctccaacgaccgcgacagcgtcctgctcgacaccaaggtcaactcggcctccgtcaccgccaccgtcaaggacgccgacccgctcgccgtctacgccatctccaagttcctgcagcccaaggagctcttcaaggtcaccgaggacctggcaccggcgcccgcgccggagggccccaagaagaagaccaagaagaagaagccgtccaccacctccgccgctgccgccccctccgacgactcctccgccgccgactcgcccgacggcacccccgcggacgacgtcgcggacaaggccgccgccgcgccgtccgtgctcgccaggtgggttaccgccgccgccacggtcgccgcggcgttggcgttggcagcttgaggtggtggtttgagcttagtgcattttgtgttgagacccagctttcttgtacaaagttggcattataagaaagcattgcttatcaatttgttgcaacgaacaggtcactatcagtcaa

SEQ ID NO: 374 - protein, 422 aa, Oryza sativa; identical to SEQ ID NO: 204

SEQ ID NO: 375 - DNA, 1483 bp, Arabidopsis thaliana
acactttaagctcttcttcactcacactctctcaaaaatcaccaaaccaaactcttcactctctccaacaatggccaagaagatgagttctctcatcatcatcttcaacattctccttctcctcacaactcaaacccacgcgcacaacgtcacgcgcctcctagcaaaccacccatcattctcttccttcagccatttcctaacacaaacacacctcgccgacgaaatcaaccggagaagaaccataaccgtttgcgcagtagataacgccgccatgtcagcattaacctctaaaggctatacactctcaactctcaaaaacattctctccctccacgtccttttagattacttcggaaccaaaaaactccaccagatccgtgacggctctgctctcgccgctactctgtttcaagccaccggagctgctcctggaacctcaggattcgttaacataacggatctgagaggtggtaaagttgggtttggtcctgacggtggagatctgtcttctttctttgttaaatctattgaagaagttccgtataacatctccattattcagatcagtagagttttaccgtcggagactgcggcggctccgactcctgctccggcggagatgaatcttaccggaataatgtcggctcatggatgcaaagtgtttgctgagactcttctcactaaccctggagcttcaaaaacctatcaggagagtttagaaggaggcatgacagtgttctgtccaggagatgatgcaatgaaaggtttcttgcccaaatacaagaacttgacagctccaaagaaagaagcatttctcgatttcctcgctgtcccgacatattactcaatggcgatgctcaaatccaacaatggtccgatgaacacacttgcgacagatggagctaacaagtttgagcttactgtacagaacgatggagagaaggttaccctcaagacaaggatcaacactgtcaagatcgttgatactcttattgatgagcagcctttagctatatatgcgactgataaggttttgttgcctaaagagttgtttaaggcttcggctgttgaagctccggctcctgctccggcaccagaggatggtgatgttgcggattctccaaaagcggctaaagggaaagcgaaaggaaagaagaagaaggctgcaccgtcgccagataatgatccttttggtgactcggattcgcctgccgaagggcctgacggagaggccgatgatgcgacggcagatgatgctggtgcggttaggatcatcggaggagctaaggctggtttggtggtgagcttgctctgcttgtttgcttcttcttggcttctatagtttcacttcgtttcttctattcttccatgtttttttttttgtgaatcttttatttatggtttttgggggaaagtaaatgaggattatttatttccctctattgttgagttttttttatttatttaaaagttggttgtc

SEQ ID NO: 376 - protein, 420 aa, Arabidopsis thaliana; identical to SEQ ID NO: 184

SEQ ID NO: 377 - DNA, 1353 bp, Arabidopsis thaliana
ctctgctccacactgacacttgaaaaaactcaaaaccgtctcatcatggcggcgtcacagacattctcactcctcgccttcactttctccctcctcgcctttgcttccaccgtgagtagccacaacatcactcaaatcctcgctgattctccagattactcttccttcaacagctacctttctcagacgaagctcgccgacgagatcaacagccgcacgacgattacagttctcgtccttaacaatggcgcaatgtctgctctcgccggaaaacatccactctccgttattaaaagcgctttaagcctcctcgtcctcctcgattactacgatccacaaaaactccacaagatctccaaaggcacaactctctccaccacactttaccaaaccaccggaaacgctcccggaaacctaggattcgtcaacatcaccgatcttaaaggaggcaaagtcggatttggctccgccgcttcaggttccaaactcgattcatcttacaccaaatccgttaaacaaatcccttacaacatctcaatcctcgagattgatgctccgatcatcgctcccggagttttaaccgctcctgctccttccgcctccttgtcaaacatcaccggattactcgaaaaagccggttgcaaaacctttgctaatttgcttgtctcaagtggagtactcaagacttacgaatccgccgttgaaaaaggcttgacggtttttgcaccgtccgatgaagcttttaaagctgaaggtgtaccagatctgacgaagctcacacaagctgaggtagtctcgctcttagagtatcacgccctcgctgagtataaacctaaaggctcattgaagactaacaagaacaatatctccacgttagccactaacggcgccggaaaattcgatctaacgacctctacctccggcgacgaagttattctccacaccggcgttgctccgtcgagactcgcggacactgtgctcgacgcgactccggttgtgatattcactgtggataatgtccttctccctgctgagctattcggaaaatctaaatctccatctccggcaccggcgcctgagccagttaccgcaccgacaccatctccagcggatgcaccttcacccaccgcagcttcaccaccggcacctccgacggacgagtcaccggaaagtgctccttcagactcgccaacaggttcagcgaacagtaagtcagctaacgcagcggttggcgtgagcacaccgtcgttgttcaccgcattggtcacgatcgccgccatagccgtctccgtgtctctctgctcttaaaacctttcgtaattacgcaggctgccactccctttgtttattttt

SEQ ID NO: 378 - protein, 254 aa, Arabidopsis thaliana; identical to SEQ ID NO: 178

SEQ ID NO: 379 - DNA, 1359 bp, Arabidopsis thaliana
ttcaactcaaccttccaaattccaatggcgacatcacgagctttcactctcttcgctttcacattatctctcctcaccgtagcttctaccgtctccggccataacattactcaaatcctctctgatacgccggaatattcctcattcaacaactacctttctcaaacaaaactcgccgacgaaatcaacagccgcactacaatcaccgtccttgttctcaacaatggcgcaatgtcttccctcgccggaaaacacccactctccgtcgtcaaaaatgctctcagcctcctcgtcctcctcgactactacgatcctttaaaactccatcagctctctaaaggcacaactctcaccaccacgctttaccaaaccaccggacacgctctcgggaacctaggattcgttaacgtcaccgatctcaaaggaggcaaagtcggctttggctccgccgctcctggctccaagctcgattcctcttacaccaaatccgttaaacaaatcccttacaacatctccgttctcgaaatcaacgctccgatcatcgctcccggaatcttaaccgcacctgctccttcttccgccggagttagcaacatcaccggacttctcgagaaagccggttgcaaaaccttcgcgaatttgctcgtatcgagcggtgttattaaaacattcgaatccaccgttgaaaaaggcttgacggtttttgcaccgtccgatgaagcttttaaagctagaggtgtaccagatctgacgaatctcacacaagctgaggtggtctcgctcctagagtatcacgccctcgctgaatacaaacccaaaggatcgttaaagactaacaaagacgctatctccactttagccactaacggcgccggtaaatacgatttaacgacgtcaacttccggtgacgaggttattctccataccggcgttggtccgtcgagactcgccgacacggtggtcgatgagacacctgttgttatattcactgtggataatgtgctccttcccgctgagcttttcggaaaatcttcatcgccggcgccggcaccggagccagtgagtgcaccgacaccgaccccggctaagtcaccgtctcctgtggaagcaccttctccaaccgcagcttctccgccagcaccaccggtggatgaatcttcaccggaaggagctccgtcagactcgccgacaagttcagagaacagtaatgcgaaaaacgcggcgtttcacgttaacgctcctgcgttgttcaccgcattggtcactattgccgccacatctctcttgttataaacaaaaccttaattacgaagactgccattgtcttccttcgacgagtttttatttctttgtgatgct

SEQ ID NO: 380 - protein, 401 aa, Arabidopsis thaliana; identical to SEQ ID NO: 306

SEQ ID NO: 381 - DNA, 1353 bp, Arabidopsis thaliana
tctcatgacctaactcaaaaaataatggcgaacgtaatctcaatttcccattttacccttctcgcattaccttatttacttctcctcctatcttccaccgccgccgcaattaacgtcaccgccgtcctctcctctttccctaatctctcatctttctcaaacctcctcgtctcttccggcatcgctgccgaactctccggtagaaactcattaaccctcctcgccgttcccaattctcaattctcctccgcctccttggacctcacgcgccgcctacctccttccgccctagcagatctcctccgcttccatgtcctcctccagttcctttcagattccgatctccgacgtattccaccgtcaggctccgccgtcactactctctacgaagcttccggtcgtacattctttggatctggatccgttaacgtaacccgtgacccggcttcaggatccgtcacgatcggatctccagccaccaaaaacgtcactgtgttaaagcttctcgagaccaaacctcccaacataaccgtcctcaccgtggactccctcatcgtccccaccggaatcgatatcaccgcatcggagactctcactccaccgccgacgtcaacatctctctcccctccaccggcgggaatcaatctcactcagatactaatcaacggacacaacttcaacgtcgctctatccctcctcgtcgcttccggtgtcataacagaattcgaaaacgacgaacgtggcgccggcatcacagtcttcgtccccaccgactccgccttctccgatctcccttccaacgttaacctccagtcattaccggcggagcaaaaagcattcgtgttaaaattccacgtgctacattcatactacactctcggttcactagaatcaataaccaacccggttcaaccgacattagccactgaagaaatgggagccggttcatacactctcaacatctcccgggttaacgggtcaatcgtaacgatcaattcgggtgtggttttagctgttgtgactcaaacggcttttgatcaaaacccggtttctgttttcggagtatccaaagttcttttgcctaaagaactatttccaaaatcgggtcaacccgttgccacagctcctccacaggagatttctttgtcgccggagagttctagtgaacagccgtcacgactagtatcaccaccgcgtgagatagtttcttccggcgcggttaaaagaccacttggtttcttggtcttgtggtgttggtgtatagcattttgttatgttttggtatgatttttttttctttctttcttttatcacataatgttttgccttcgattagggctttatttattttta

SEQ ID NO: 382 - protein, 424 aa, Arabidopsis thaliana; identical to SEQ ID NO: 214

SEQ ID NO: 383 - DNA, 1311 bp, Triticum aestivum
atggggagaggctcccctcccgctcccgccccgcgcctcgcgcccgggctgccggccctgctcgccgccgcgctgctgctgctgctgctgccggccccggccgccggggtcaacgtgacggccgtgctcgcggcgttccccggcttctccgacttcgcgcggctgctcgcgtcctccccggtggccgcggagctggcggggcggtcgtcgctcacgctgctggccgtgcccaacgccaacctgccgcgctcgccctccgccttcgccgcggccgccggcgccgacctcgccgacgtgctgcgctaccacgtcctcctcgagtacctctccccgcccgacctcgcccgcgtccccgcctcgggcaggctcgtcaccacgctcttccagaccaccggccgcgcgccctccgacctcggcgccgtcaacctcacggccactgccgcgggcggcggcagcagcagctccgccgtcgtcgtccgctcgccgtccccgtccccggggtcgaacgccaccgtcctcggcgccgtgaccagggagccgtacaacctcagcgtgctggccgtgggcggcctcatcgtgccctccggcttcgacatcgccgcgtcgggctccgagacccgcccgtccccggggggaacatcaccccgtcctcacgacgcgcgcggcttcacttggccgctcatgaaagtgcccgcctccatgctcgaggcctggggcgtggcggacgacttcgaggccgacgagcgcggcgccggcatcaccatcttcgtcccaaccgacgacgccttcgcggccctccccgccaccgaccgcctccagtccctccccgccgaccgcaaggccgtggtgctgcgcttccacgtgctgcactcctactacccgctggggtccctggagtccatcgtgaaccccgtccagcccacgctcgccaccgagtgcaccgaggccggccgcttcacgctcaacatcacgcgcttcaacggctccgtcgccatcgacaccggcgtcgtgcaggcgtccatcacccgcacggtgttcgaccagaatcccgtggcggtcttcgccgtctccaaggtcctgctgcccaaggaaatgttcagccgcgggaacaccattaaccccggagctgccacccctcccgccaccatgaccccagacgtctccgatggcccgcggacgccgccgacgaagctgtcgtccccgccggccctgcgcggccaggacagcaagccatcatcagcaccagcaagaaacgcgaactggtggtgtacaggaataggattggtctgcctgctcctacctctgctatga

SEQ ID NO: 384 - protein, 436 aa, Triticum aestivum
MGRGSPPAPAPRLAPGLPALLAAALLLLLLPAPAAGVNVTAVLAAFPGFSDFARLLASSPVAAELAGRSSLTLLAVPNANLPRSPSAFAAAAGADLADVLRYHVLLEYLSPPDLARVPASGRLVTTLFQTTGRAPSDLGAVNLTATAAGGGSSSSAVVVRSPSPSPGSNATVLGAVTREPYNLSVLAVGGLIVPSGFDIAASGSETRPSPGGTSPRPHDARGFTWPLMKVPASMLEAWGVADDFEADERGAGITIFVPTDDAFAALPATDRLQSLPADRKAVVLRFHVLHSYYPLGSLESIVNPVQPTLATECTEAGRFTLNITRFNGSVAIDTGVVQASITRTVFDQNPVAVFAVSKVLLPKEMFSRGNTINPGAATPPATMTPDVSDGPRTPPTKLSSPPALRGQDSKPSSAPARNANWWCTGIGLVCLLLPLL

SEQ ID NO: 385 - DNA, 1082 bp, Triticum aestivum
atggaggcggagcggaagcggcgggtaaagctgaatcctggtttttatgctctgcgcgcggtggttccgcaaatgtccaacatggacgaggaatatctgctgaaccatcccctccgctacctcggacttctcccagatcacctccggcgtggcccgccggaacgtgcggacgcagatccacgggcgcaggccagtgaccgtcctcaccgtgacaactccgccgtggcgcggctctgggagcggcgcctatatccggacgccctcgcgcgcgtgctctccctgcacgtcctcctcgactacctcggcgacgccaggctccgtaccctcgacggcgggttcaggcaggccgccagcctctaccatgcccacggcgcgccgggggccgccggcttcttgaacttcacgcggggcggccaggacgacctcgtctcgttccggccagcggagggggtgaacgggaccgccgccgtgttctacgtgaagtcggtcaaggaggcgccctgggacatcgccgtgctgcaggtgagcgacgccatctcgtccttcaccgccgaggcgaaggtgcccacgccgccggccccggctcctgctcccaaggcgcctgcgcctgctcctctggcgccggtcgtggcccctgcacctgctaaggccccggcggccctgcctccgtcgccaaagaaccacaccgcgccaccgccgaagccggccaaagagcccgtgccttcgccaacgcccgtggtggagacgccggcggaaggacctggggcggacggagatcagccgcctgccgacgagcacaagagtggcgccagcgactcggagccgtggagcctcggcgcggtggtggcggtggccgtgccggtcgtcgtgtttctgctgtggtgagcaatctgtgcttggaatgaatgcccgctgttaggggccctggatcccgtgattagtgttcgcgcttacccgcatggagacagtggttaatgagcgctggttatcgctggcagatttgagcagaaataattgtacgatgctcgtgtttagtcaaggagtgcatgcctatgtttgaattgcgctactggtttatttct

SEQ ID NO: 386 - protein, 294 aa, Triticum aestivum
MEAERKRRVKLNPGFYALRAVVPQMSNMDEEYLLNHPLRYLGLLPDHLRRGPPERADADPRAQASDRPHRDNSAVARLWERRLYPDALARVLSLHVLLDYLGDARLRTLDGGFRQAASLYHAHGAPGAAGFLNFTRGGQDDLVSFRPAEGVNGTAAVFYVKSVKEAPWDIAVLQVSDAISSFTAEAKVPTPPAPAPAPKAPAPAPLAPVVAPAPAKAPAALPPSPKNHTAPPPKPAKEPVPSPTPVVETPAEGPGADGDQPPADEHKSGASDSEPWSLGAVVAVAVPVVVFLLW

SEQ ID NO: 387 - DNA, 1080 bp, Triticum aestivum
atgcggtgcctgcatctcgccgccgcgctgctcctggccgtcgcgctgcccctcgcggccgccgtgggggtttatgtcaaggccccggcggcccctccggcgctttcgagcgccacggaggcgatggccaagggcgggtgcaaggccttcgcggccctgatcgcggcctcgcccgacgtggtgtcctcttatgacttcgccgcgagcggcggcatgacggtgttctgcccctccgacgacgccgtggcgtccttcatgccccggtacaagaacctgaccgccgacggcaaggcgtcgctgctgctgttccacgccgtccccgtgtactactcgccggggagcctcaagtccaacaacggcgtcatgaacaccctcgccaccgacggctccgcccggaactacaacttcacgctgcagaacgagggcaacgtcgtcaccatcaagacgggcgcctccgggggcgtcgcgcgggtcaagaccacgctgctcgacacggaccccgtcgccgtctacgccgtcgacaaggtgttcgagcccgtcgagctgttcaagcccgcgccgtccccgacccccgcgcccgcgcccgccccggcggccgacgcgcccaaagcgggcaagggcggcgccgcgcgccaccgctcgccccccgccgtcgcggacgcgcccggacccgaggctgaagacaccgccccggcggaccagaagaaggactccaagaagagcgcggccgccggcgcgccgcgcgcaaggtggctcgccgcggcgctggcgaccgtggccgtggcttccacgctggcttaaggtattttatttccctccctggtgcttgatccgttggcgtgatcgatcgtggtgtgacggcgtgctcgtgtaatgcttctttcctcggaagacatactaattgtgtgctcgattttcatcggctttttcttcttctcattagatgttcttattatccttggattgcccctaataattctgctcgtgctacttacaaggtaacagatcacctatggagaggtttcattgctaataaaacaaaaataatacatgatttaagcggcgtccgctttaaaaaaa

SEQ ID NO: 388 - protein, 266 aa, Triticum aestivum
MRCLHLAAALLLAVALPLAAAVGVYVKAPAAPPALSSATEAMAKGGCKAFAALIAASPDVVSSYDFAASGGMTVFCPSDDAVASFMPRYKNLTADGKASLLLFHAVPVYYSPGSLKSNNGVMNTLATDGSARNYNFTLQNEGNVVTIKTGASGGVARVKTTLLDTDPVAVYAVDKVFEPVELFKPAPSPTPAPAPAPAADAPKAGKGGAARHRSPPAVADAPGPEAEDTAPADQKKDSKKSAAAGAPRARWLAAALATVAVASTLA

SEQ ID NO: 389 - DNA, 585 bp, Triticum aestivum
  misc_feature (486)..(486): n is a, c, g, or t
  misc_feature (522)..(522): n is a, c, g, or t
  misc_feature (526)..(526): n is a, c, g, or t
  misc_feature (533)..(533): n is a, c, g, or t
  misc_feature (557)..(557): n is a, c, g, or t
  misc_feature (564)..(564): n is a, c, g, or t
  misc_feature (568)..(568): n is a, c, g, or t
  misc_feature (572)..(572): n is a, c, g, or t
  misc_feature (581)..(581): n is a, c, g, or t
attccagctccaacatctctctcctagctacatctctccactgtctgtttgcctgtcgaggccgggcgccagcagcaacaatggcgaggatgatcagccggccggccgtcctcctctcccccctggccatgatcgtcgtggccgccgccgtcatggcgctggcaccggcgccggtggccgcgaccaagtacaacatcaccaagattctggcgccctacaaggagtactccaagttcaacgacatgctgtccaagacgcgcctcgcgtacgacatcaaccggcgccagaccatcaccgtgctggccgtcgacaactccgccatgtcggcgctcgaccactactcgctgcagaccatccgccacatcctcgagctgcacgttctcgtcgactactacggcgacaagaagctcaagaactcgcccatggctcaacgcttctcctccaagttcaagctacgggtcggcgtctggatgtcgggtacttaantaaccggaaggacggaagttactcatacgaggaccnacanacgcaancgtccgtactaagtcgtcaaggantcccacnaatnccgnctcaagtantcaa

SEQ ID NO: 390 - protein, 134 aa, Triticum aestivum
MARMISRPAVLLSPLAMIVVAAAVMALAPAPVAATKYNITKILAPYKEYSKFNDMLSKTRLAYDINRRQTITVLAVDNSAMSALDHYSLQTIRHILELHVLVDYYGDKKLKNSPMAQRFSSKFKLRVGVWMSGT

SEQ ID NO: 391 - DNA, 707 bp, Triticum aestivum
  misc_feature (689)..(690): n is a, c, g, or t
  misc_feature (698)..(698): n is a, c, g, or t
  misc_feature (700)..(700): n is a, c, g, or t
ccacgcgtcgcagcctactagccatagtcagaagccactcagcagctcccctccctcgcgttctcttggtgcaggcgcgatggccgcaccttttctgctccttcttctgctcgtcgtttccggaggcgctgcagcgggcggcgacggcgaggcagggctgccccggctcgagttccgaggcatcgacgacacgggccgtaggcacgggcccttcgcgctggaggagccggagttcatgcgcgatatctccacgcacgacgacgaggcgggcgaagctccccagcttgagttccgaggcatcgacgactcaggccgtgggcacgcgtccgacgcgccggaggagccgttgttcatggcccatctcgacgacgaggcaggcgaagcgccccagctcgagttccgaggcatcgacggctcggtccatgggcacgcgtccgacgcgccggaggagcgggcgttcacggacgttatctccacgggcggcgcctgcgaccacttcgcccgcctcgtcgccgagacggggaacgcgagccagcttttctgggagcgcgccgcgggcgccggcggtctcacggtgttctgccctgaagacaaggccctcgccgagttcgagcccaagttccgaggcctcggcgcggacgaccggctcgccgtcctgctgtaccacggggcgggacactaagggaganntgtcacgncnactggtg

SEQ ID NO: 392 - protein, 200 aa, Triticum aestivum
MAAPFLLLLLLVVSGGAAAGGDGEAGLPRLEFRGIDDTGRRHGPFALEEPEFMRDISTHDDEAGEAPQLEFRGIDDSGRGHASDAPEEPLFMAHLDDEAGEAPQLEFRGIDGSVHGHASDAPEERAFTDVISTGGACDHFARLVAETGNASQLFWERAAGAGGLTVFCPEDKALAEFEPKFRGLGADDRLAVLLYHGAGH

SEQ ID NO: 393 - DNA, 1293 bp, Triticum aestivum
cgccctgtttcatctccggacgagccatacttcccaagaacaccagaggggagccacacgtacgttgcgactcgcaacaatgtcactccccggcgctctcaccgcgagctcattcgccgtcctcctcctcctcgccctctccacgtggccgacgtgccacgccacccacaacatcaccgccatcctcgcggcgcgccgggacatgtccgagttcagccgcctcctcacgacgacgggcctggcggacgaaatcaacgagcgcaacaccatcacggtcctcgcggtcgacgacgccgacatggctccgctcagggcgcgtcatctcccgcgggaagcgctccggcacgtgctctccatgcacgtcctcgtcgactactacgaccacgacaagctgcaccgcctcccgggcggctccgcggacgtgtccaccctgttccaggcctccggcgacgcgcccggcagcgccggcatggtggagatctccgagcgccggggcgggagcgtggccttcgtgcctcaggacgccggcgacgacgcgcgcgccaccagcgtgctcttcgtcaagcccatccacgaggagccgtacaacatctcggtgctgcaggtgggcgccgtcatgtcgtccccggccgccgaggcgccctcgtcgcccgagacttcaactccaacctcaaggcacaacgccaccgacgtcgtgcccaagaccaagaaagggaccgggtcagcggacgacgccgccgacgcgccttcggcggacgacggggacgacgaacgagaggaccatgcgaagaagaacggcgcgatcagcgcggctcccggccggctatccttggctctggcgttcctgctggcgatcaagatcgtcgtgcgcgtttgaaggttgattgcggctgtgtgttgtgagttgctgtttgttgggttcctcgatcttgttcctgcacgtgtcagtattactactggggatatggtgagtgctttgattaatttgctaggtcgttgatgcgttggaaacgttcttgtagtttcattttgtttgccaagagagctttgcaggcctgtgtcctgattcatctagtgtgtctagtccagactccagatctggtggtgttataaactggtctacccaaatacatttgcctagctttagctagctacagtactattttcttttggtaaatcttctggtgtactctcatgtagtaattgctgcatacgtagtacattaatcggagttctgcgggctacaagttcattcggttctataaatctgtcgtcttattcctatttgtcttt

SEQ ID NO: 394 - protein, 265 aa, Triticum aestivum
MSLPGALTASSFAVLLLLALSTWPTCHATHNITAILAARRDMSEFSRLLTTTGLADEINERNTITVLAVDDADMAPLRARHLPREALRHVLSMHVLVDYYDHDKLHRLPGGSADVSTLFQASGDAPGSAGMVEISERRGGSVAFVPQDAGDDARATSVLFVKPIHEEPYNISVLQVGAVMSSPAAEAPSSPETSTPTSRHNATDVVPKTKKGTGSADDAADAPSADDGDDEREDHAKKNGAISAAPGRLSLALAFLLAIKIVVRV

SEQ ID NO: 395 - DNA, 1031 bp, Triticum aestivum
  misc_feature (991)..(993): n is a, c, g, or t
ctagaggaaaataccgcccgaaacgttacgaagcttcagcaattacaaggatcatacgaaaaaacataaacaaaacgaagaacaacacaccgaaacaaaccgaacgattcgagcacctctcgtctctcgagtctcgacgaagaaaagggaaaatcaaaacatccaatgcatggcaacatccgactgtccgccactcttcctcgatcgtcacatgccacaccacgcggccgccacggcgacggccaccatgcagagaccgccgccgaggccccgcatctcccggggcgccgccgcggacgccgtggctgtatcggcctccggcgcgtcggccaccgccaccggcccggccttcttcttgtccttgtccttgtccgccgccggcgacggcacgggcgcgggcacgggcggcccgtagagcgcccacggcagcagcaccttgtccacctggtacaccaccagcctgtcgccagtgtagagcgtgccgtcgacggaggcgttgacgacgccggtggagatgttcaccctcccgccgccatcggacgtgacgttgagcgggtacttgcccctgccggtgtcgccggcctgcgtgcgcagcgggttgctcaccgtgtcgaactgcgccatggggagcagctgggagaccacgtggaactgcaccagcgacgtcttctgttgatcggagagggagttgagggtgccggacttgagcgcggtgaaggcgttgtcgggcggcgcaaaaacggtaaggccggcccccggtgaggccttgcccctgaactgggtgtccatctggtcctcctcctgcgtcgactgcagcagctggagaacttggtgaactgcccggccttggtcagaaccgcctgaatcccttcggggcaaccgccggtggacccggcgcgcccccccccccgggcaaaaaactgaggaaggggttggggaaagaaaaaggccccccccccccccccccccccccccataaatcgaatttggnnnttaattgagggtttgggcggaaggggccccggggtgta

SEQ ID NO: 396 - protein, 193 aa, Triticum aestivum
MDTQFRGKASPGAGLTVFAPPDNAFTALKSGTLNSLSDQQKTSLVQFHVVSQLLPMAQFDTVSNPLRTQAGDTGRGKYPLNVTSDGGGRVNISTGVVNASVDGTLYTGDRLVVYQVDKVLLPWALYGPPVPAPVPSPAADKDKDKKKAGPVAVADAPEADTATASAAAPREMRGLGGGLCMVAVAVAAAWCGM

SEQ ID NO: 397 - DNA, 435 bp, Triticum aestivum
  misc_feature (335)..(335): n is a, c, g, or t
  misc_feature (346)..(346): n is a, c, g, or t
acgacatgctgtccaagacgcgcctcgcgtacgacatcaaccggcgccagaccatcaccgtgctggccgtcgacaactccgccatgtcggcgctcgaccactactcgctgcagaccatccgccacatcctcgagctgcacgttctcgtcgactactacggcgacaagaagctcaagaagctcgcccatggctccaccgcttcctcctccatgttccaaggctaccgggtcggcgtctggcatgtcggggtacgtgaacatcacccggaaggacggcaaggttagcttcatgacggaggacgccgacgacaccgcgaaccgtcccggtacgtcaanccgtcaaggantcccctacgacatcgccgtgctccaagtgagtccatcatctcgtccgccgaggcgaagcgccggtgccgccccggcgccgttgactcga

SEQ ID NO: 398 - protein, 92 aa, Triticum aestivum
MLSKTRLAYDINRRQTITVLAVDNSAMSALDHYSLQTIRHILELHVLVDYYGDKKLKKLAHGSTASSSMFQGYRVGVWHVGVREHHPEGRQG

SEQ ID NO: 399 - DNA, 1546 bp, Triticum aestivum
atggaggcgcggcggcggacgttgctggtggcgctggcggtgctggccctggcggcggcggcggaggggtacaacatcaccaagatcctggcggcgtacccggagtactcgcagttcaacaagctgctgacgcagacgcggctggcgcaggacatcaacaagcgccgcaccatcaccgtgctcgtcgtggccaacggcgacatgggcagcctcgccggcgggggccgcacgctgcagaccatccgccacatgctccagattcacgtcctcgtcgactactacggcggcaagaagctccaccagctcgcgcacggcgtcaccgcatgctcctccatgttccaggagtccggcgcggcccccggcatgtccgggtacgtgaacatcacgcagcaccggggcggcaaggtgacgttcacggcggaggacgcggaggacagcgcgccctcctccgccttcgtcaagtccgtcaaggagatcccctacgacctggcggtgctccagatcagcaaggtgctggcctcgccggaggccgaggcgcccgtggcggcgccggcgcccgtcaacatcaccgagctgctctccaagaagtactgcaagagcttcgccggcctgctggccgccgacgccgacgcctacagcaccatcaacgccaccaaggacaacgggctcaccctcttctgccccgtcgactccgccgtcgcctccttcatgcccaagtacaagaacctgacggccaagggccggacggccatcctgctctaccacgccgtgccggactactactcgctgcagctgctcacctccaacagcggcaaggtcagcacgctcgccacctccaacgtcgccaagaaggactacagcttcgacgtggagaaggacggcgagaccgcggagctcgacaccaaggtgaactcggcgtcggtcacctacaccatcaaggacgacgacccgctcgccgtctacgccatctccaagttcctgcagcccaaggagctgtacaagatcgccaaggacatcgcccccgcgccggcgcccgaggcccccaagaagaagaagaccaccaagaagaagccctccgcggccgcctcgccctcggacgacgacgacgacgatgactccgccgcggactcgcccgacgactcctcgtccgacgacgccaccgccgacaaggacggcgccgcgccgtccgcggtcgccgggtgggtgaccgccgccgtggccgtggcctcggcgctggcattggcagcttaataaaggtgtgtgaactagtgtgtttttgtgctgagttctccgaaaattcgtggcccttgttatttatcgcgaaaaataagaagggccatttcattcatatttattaccacatgtcctgaagaaaaagaaggaaaaagacaggaatttccttggtttttgttgtgatgatcattttgtaatgatagtggtcaatggtactggaatgtgtgtttgtgtttataatactacatatgacagacatcctggagcttagagtgatgtacaattttctagttctaccactctacttttgcct

SEQ ID NO: 400 - protein, 416 aa, Triticum aestivum
MEARRRTLLVALAVLALAAAAEGYNITKILAAYPEYSQFNKLLTQTRLAQDINKRRTITVLVVANGDMGSLAGGGRTLQTIRHMLQIHVLVDYYGGKKLHQLAHGVTACSSMFQESGAAPGMSGYVNITQHRGGKVTFTAEDAEDSAPSSAFVKSVKEIPYDLAVLQISKVLASPEAEAPVAAPAPVNITELLSKKYCKSFAGLLAADADAYSTINATKDNGLTLFCPVDSAVASFMPKYKNLTAKGRTAILLYHAVPDYYSLQLLTSNSGKVSTLATSNVAKKDYSFDVEKDGETAELDTKVNSASVTYTIKDDDPLAVYAISKFLQPKELYKIAKDIAPAPAPEAPKKKKTTKKKPSAAASPSDDDDDDDSAADSPDDSSSDDATADKDGAAPSAVAGWVTAAVAVASALALAA

SEQ ID NO: 401 - DNA, 1076 bp, Triticum aestivum
  misc_feature (10)..(10): n is a, c, g, or t
  misc_feature (13)..(13): n is a, c, g, or t
  misc_feature (18)..(18): n is a, c, g, or t
  misc_feature (1029)..(1029): n is a, c, g, or t
  misc_feature (1040)..(1040): n is a, c, g, or t
acccacgctnctncccgncacgagcacgaacaccaaccttttatatagcgtcgcctcctctcggcagcacccttgccagcctctcctcttcttctcccgtcctcgccttccctgccctgctcaggggatttggatcagggaagaagagaaggcaagcaagcggtggtgaccatggagttcaaagcggccgctttcaccgcagccgttctggcagtcctcctctgttccccagcatcagcccagaagagtccaccggcgccctcgccggtgtcggtgtcaattccgccgtccctcgctccggcgccggcgccggccccgcgctacgtggacctggcggcgctcctcgacgtggccggcccgttccacaccttcctcggctacctgcagaagacgaaggtgatcgagaccttccaggcccaggccaacaagaccgacgagggcatcaccatcttcgtccccaaggactcggccttcgcggcgctcaagaagtccaccttctccaacctcaccggcgaccagctcaagacgctgctcctctaccacgccttccccaagtactacccgctggcgcagttcaggaacctcagctcgctcaacccggtgaacaccttcgccggctcgccctacacgctcaacctcaccgacgacatgggcagcatcagcgtcgagtccatgtggtccaagcccaagatctccagcagcgtctacgccaccaagcccatcgccgtctactccatcaacaacgtgctcctgcccatgcagctcttcagcaaggacccgccgctggcgccggcgccggcgcccgcgccggagtcgggggcgtcggacatcgcccccagcccgggcggcggcaaagcgggcgccgggaacggcaggcggactcgacgagcgccgggcatgtcggtgtcgcgaattgcttggggctgctggctgccgcggcaggttgctgatgctcctgtggtaagagagacccatggatggatggtcctgtcatggtaagccctgaattggatttgagctgttggtggnaacaacaccanccccccaaaaacaaccgggcggcgtcctaaatttcc

SEQ ID NO: 402 - protein, 275 aa, Triticum aestivum
MEFKAAAFTAAVLAVLLCSPASAQKSPPAPSPVSVSIPPSLAPAPAPAPRYVDLAALLDVAGPFHTFLGYLQKTKVIETFQAQANKTDEGITIFVPKDSAFAALKKSTFSNLTGDQLKTLLLYHAFPKYYPLAQFRNLSSLNPVNTFAGSPYTLNLTDDMGSISVESMWSKPKISSSVYATKPIAVYSINNVLLPMQLFSKDPPLAPAPAPAPESGASDIAPSPGGGKAGAGNGRRTRRAPGMSVSRIAWGCWLPRQVADAPVVRETHGWMVLSW

SEQ ID NO: 403 - DNA, 1090 bp, Triticum aestivum
  misc_feature (17)..(17): n is a, c, g, or t
gacccacgcttccgatncagtggtgctctgctcagctcggctcagtgctctccaccagtccgccccaccccactccatcccgagctgagctgagacgacaccagcggccaagctccagacgccgacgaccgaggaggagagggtgatggaggcgcggcggcggacgttgctggtggcgctggcggtgctggccctggcggcggcggcggaggggtacaacatcaccaagatcctggcggcgtacccggagtactcgcagttcaacaagctgctgacgcagacgcggctggcgcaggacatcaacaagcgccgcaccatcaccgtgctcgtcgtggccaacggcgacatgggcagcctcgccggcgggggccgcacgctgcagaccatccgccacatgctccagattcacgtcctcgtcgactactacggcggcaagaagctccaccagctcgcgcacggcgtcaccgcatgctcctccatgttccaggagtccggcgcggcccccggcatgtccgggtacgtgaacatcacgcagcaccggggcggcaaggtgacgttcacggcggaggacgcggaggacagcgcgccgtcctccgccttcgtcaagtccgtcaaggagatcccctacgacctggcggtgctccagatcagcaaggtgctggcctcgccggaggccgaggcgcccgtggcggcgccggcgcccgtcaacatcaccgaactgctctccaagaagtactgcaagagcttcgcgggccctgctggccgccgacgcccacgccttcgcaccatcacgccaccaaggacaacgggctcaccctcttctggcccgtcgactccgccgtcgcctccttcatgccccagtacaagaacctgacgggcacgggcggacggccatcctgctttacccggccgggccggacttatattccctggagctgctcccccccaacacgggcaggttgacccgctccccccctccaacctcccaaaaaagactccactttgacgttggcaaggacggccaccccgcgatgtcccccccagggtgcctccgggtggtccccttacccctggggcaatggcccggtcg

SEQ ID NO: 404 - protein, 242 aa, Triticum aestivum
MEARRRTLLVALAVLALAAAAEGYNITKILAAYPEYSQFNKLLTQTRLAQDINKRRTITVLVVANGDMGSLAGGGRTLQTIRHMLQIHVLVDYYGGKKLHQLAHGVTACSSMFQESGAAPGMSGYVNITQHRGGKVTFTAEDAEDSAPSSAFVKSVKEIPYDLAVLQISKVLASPEAEAPVAAPAPVNITELLSKKYCKSFAGPAGRRRPRLRTITPPRTTGSPSSGPSTPPSPPSCPSTRT

SEQ ID NO: 405 - DNA, 1125 bp, Triticum aestivum
cctacgacccacgcgttccgcgcttttgcgatccatgacggccacctttctcctcgtgctcctctccctgtccgcagccgctccgtcggctcgtggccaggcggtggcggccgcgccggctccagcggcggctgccccgaagacgatcaaggcggtgctgaccaaggccgggcagttcaccaagttcctccagctgctgcagtccacccaggaggaggagcagatcgacacccagctcaagggcaaggcctcatccggcggcggtctcactgtcttcgcgccgccggacaacgccttcactgcgctcaagtccggcaccctcaactccctctccgaccaacagaagacgtcgctggtgcagttccacgtggtctcccagctgctccccatggcgcagttcgacacggtgagcaacccgctgcgcacgcaggccggcgacaccggcagggggaagtacccgctcaacgtcacgtcggacggcggcgggagggtgaacatctccaccggcgtcgtcaacgcctccgtcgacggcacgctctacaccggcgacaggctggtggtgtaccaggtggacaaggtgctgctgccgtgggcgctctacgggccgcccgtgcccgcgcccgcgcccgcgccgtcgccggcggcggacaaggacaagaagaaggccgggccggtggcggtggccgacgcgccggtggccgatacagccacggcgtccgcggcggcgccccgggagatgcggggcctcggcggccgtctctgcatggtggccatcgccgttgcggccgcgtggtgtggcatgtgacgatcgaggaagagtggcggacagtcggatgttgccatgcgttggatgttttgatttccccttttcttcgtcgagactcgagagacgagaggtgctcaaatcgttcggtaaccgatatttttaatgttaatgtttttcctccggggtgtggttcttcgttttggttatggtttttcagtatgatccttgtatttgctggaagcatcctaacgtttcgggcagtattttcctcctaaaaaaaaaaaaaaaaggggggccctttaaagtttcctcgaggggcccaacttcgcgttcccggttttttttcaaggtgcccctta

SEQ ID NO: 406 - protein, 256 aa, Triticum aestivum
MTATFLLVLLSLSAAAPSARGQAVAAAPAPAAAAPKTIKAVLTKAGQFTKFLQLLQSTQEEEQIDTQLKGKASSGGGLTVFAPPDNAFTALKSGTLNSLSDQQKTSLVQFHVVSQLLPMAQFDTVSNPLRTQAGDTGRGKYPLNVTSDGGGRVNISTGVVNASVDGTLYTGDRLVVYQVDKVLLPWALYGPPVPAPAPAPSPAADKDKKKAGPVAVADAPVADTATASAAAPREMRGLGGRLCMVAIAVAAAWCGM

SEQ ID NO: 407 - DNA, 598 bp, Triticum aestivum
cggaggccgcggaagcgggggcgcaagccggcgaacgggcgggaggagccgctgaaccacttggaggcggagcggaagcggcgggtagaagctgaatcctggtttttatgctctgcgcgcggtggttccgcaaatgtccaacatggacgaggaatatctgctgaaccatcccctccgctacctcggacttctcccagatcacctccggcgtggcccgccggaacgtgcggacgcagatccacgggcgcaggccagtgaccgtcctcaccgtgacaactccgccgtggcgcggctctgggagcggcgcctatatccggacgccctcgcgcgcgtgctctccctgcacgtcctcctcgactacctcggcgacgccaggctccgtaccctcgacggcgggttcaggcaggccgccagcctctaccatgcccacggcgcgccgggggccgccggcatcgtgaacatcacgcggggcggcaaggacgaccacgtctcgttccggccagcggagggggtgaacgggaccgccgccgtgttctacgtgaagtcggtcaaggaggcgccctgggacatcgccgtgctgtaggtgagcgacgccatc

SEQ ID NO: 408 - protein, 154 aa, Triticum aestivum
MSNMDEEYLLNHPLRYLGLLPDHLRRGPPERADADPRAQASDRPHRDNSAVARLWERRLYPDALARVLSLHVLLDYLGDARLRTLDGGFRQAASLYHAHGAPGAAGIVNITRGGKDDHVSFRPAEGVNGTAAVFYVKSVKEAPWDIAVLVSDAI

SEQ ID NO: 409 - DNA, 1169 bp, Triticum aestivum
atggcgtcggcgtcgcggatcctgctcgtggccgcgctgctcctggcggcgtcggcgatgacgtcggcgcaaaaggcgaaggcgcccgcgaagccggcccccgccgccgccgacgcgcccgcggccgtcgaggcgcccgcgaagcccgccccggccgcagccgacgcgcccggcgcggctgccgccgacgggaagccgccgacggacgtgacggccatgctggagaagtccggcaagtactccaagttcgtgcagctgctcaaggagacccgcgtggagacccagatcaacgcgcagctgacggacagctacaacgggctgaccatcttcgcgcccaccgacgccgccatcgacgggctcaaggccggcaccctcaacgggctctcgtcccaggagcagatccagatggtgctctactgcgtgctgccacggttctactccctctccatgctcggcaccctcaacggcaaggtcagcacgcaggcgtccggccactccggcccctacacctacaagatcaagccctccggcaacaacgtcaacgtctccaccggcgtcaagggcaacaacatgctcctcggcagcgtcgtcagcaaggacttcccgctggcctgctactccgtggacaagatgccgctcccctacgagctgttcggcccgcagccgcccaccccggcgcccgccccggccccggcccccaccaagtccaagcccaagaagaagaagaagtccgccgggatcgccgaggcgcccgaggccgacgacgccaccgccgacgacgacaccgagaagtccgccgccgcgtccctctccggcgtcgccaggtgggccgctgtactcggtgccgccgtcctcggcgccatgttctgatctgatccgatccgatccgatccgagaggaacgacacaaggtggtggtggtgccatctttcttgcactgtgcgtgatcgagttggtgcggtgcggtgcgctcagcactcagcacgcatcccctgtaccgatactgtgatctgatgatgtgtatgtccatcggctttattctttcttcttcctttttccttgttttcttcttgattgatgaacactcaattcttcttcttcttctctggttttcttgttggtctgtatgctgtaatttatgtgatatactagtgcttctcgaattcattc

SEQ ID NO: 410 - protein, 289 aa, Triticum aestivum
MASASRILLVAALLLAASAMTSAQKAKAPAKPAPAAADAPAAVEAPAKPAPAAADAPGAAAADGKPPTDVTAMLEKSGKYSKFVQLLKETRVETQINAQLTDSYNGLTIFAPTDAAIDGLKAGTLNGLSSQEQIQMVLYCVLPRFYSLSMLGTLNGKVSTQASGHSGPYTYKIKPSGNNVNVSTGVKGNNMLLGSVVSKDFPLACYSVDKMPLPYELFGPQPPTPAPAPAPAPTKSKPKKKKKSAGIAEAPEADDATADDDTEKSAAASLSGVARWAAVLGAAVLGAMF

SEQ ID NO: 411 - DNA, 1139 bp, Triticum aestivum
ggcgtccgtacctatgcccgactacgtcttccctgccccgctcccgggaattggttcaggggagaagaggaggcaagcaagcggtggtgatcatggggttcaaagcggccgttttcaccaccgccgtgctggccgtcctcctctgctccccggcatcggcccacaagagtccaccggcgccagcgccggtgtcggtgtcaattccgccgtccctcgcgccggcgccggccccggccccgcgctatgtggacctggcggcgctcctcgaggtggggggggcgtttttttccttcctcacctacctgcagaagacgaacgtgatcgggaccttccacgcccaggtcaacaagaccgacgagggcatcaccatcttcgtccccgaggactcggcgtccgctgcgctcactgggtccaccttctccaaccttaccggtgaccagctcaagacgctgctcctctaccacgcctgccccaggtactacccgctggggcggtgccggaatctcatggccgctcaacccggggaacgccttcgacgggtcgcccttcacgctcaacctcgcctgggcacatgggccgcatcagccgtagattgctgagtgctccgaggcgcggcattggcctgccggggggtagggcgggaaagcccatgcgccgtgggggcgagcgagaaggttggcccgtgcccgtggccgttgcaaggagggccccggcggttggggccggggctaggcccgggggccgggggttagggcgacgaggggtcgtgcccgggagcggggcacggcgctgtggccgcctcgtccggagcagggagcggtggggtggtccggcgggacgcgtgggtcggccccccggcgcgcgctgccgggcctcggggcgtccgcgggagggggggcgcggtcgcccgcgtggctgcccgggtcgtggcagcgccgcggtcggcgagcgcggccgttcgcctcgtgtcacttggggcgaggtgcgtcgcctgcgtcggtgtcgggtcctgccggctcgcgggcgcgggcgctggccgctgtcgcgcggggtgtctcgtggacacggcggggctggggggggcgcggcggctccagagatgccgcccgaggcagcggtcgcgtcgttcctccgcgcgc

SEQ ID NO: 412 - protein, 168 aa, Triticum aestivum
MGFKAAVFTTAVLAVLLCSPASAHKSPPAPAPVSVSIPPSLAPAPAPAPRYVDLAALLEVGGAFFSFLTYLQKTNVIGTFHAQVNKTDEGITIFVPEDSASAALTGSTFSNLTGDQLKTLLLYHACPRYYPLGRCRNLMAAQPGERLRRVALHAQPRLGTWAASAVDC

SEQ ID NO: 413 - DNA, 965 bp, Triticum aestivum
atgggagcccaagcggctgttctcgtcagcgcattgctttgcctggcgctctcccgcggcgcgctgtcccagaaggcacgggccccgatcgtcgagaccccggcgccggcgccggccccgcgccacgtcgagctcgccgaactgctctccctcgccgggccgtatggcaagttcctggaatacctcaccaagaccgacgtgatcaagacgttccagagccaggccaacgacacgaagcagggcatcaccgtcttcgcgccgcaggactcggcgttcgcggccctcaacgagaccgtgctgtccaacctcactaccgaccagctccggtcgctcatgctgcaccacgccatgcccagttactaccagctctcggccttctccgcgctggcggcggcgagccaggtgtccatgtttgcgtacaaggtgaacgtcacctacgccgcgggcacgatcggcgtcgtgtcgggctgggccaccgccaagctcgccagcagcgtgtactcgacgtcgcccgtcgcggtgtacgcgctcaacagggtgctgctgcccaaggagatcttcccggctgccccggagatggcgcccgtgcctgcgccggcgccggcgccgggacgtgggggcaaggcgatggctgacgcgccgggcgccagcgagcgtgctgccagtgacaatgcggatgccaagagttcgtcctgccgggtcgttggcgctgggagccttgcacttggctacgtggttctgctggtctccgggcttttgatggtgtagtcggataattctttgcatgcgttggcacgtgccatgaatttttatttccttccggaaagtgtttgtaaattcatttattccgccgaaatggtgtacaacataatgtaaatggtgcacatcataatgtatgcactgcttgtatgtattgtagaattatcataaacatgagacattgagagcaaacaactttatttggg

SEQ ID NO: 414 - protein, 255 aa, Triticum aestivum
MGAQAAVLVSALLCLALSRGALSQKARAPIVETPAPAPAPRHVELAELLSLAGPYGKFLEYLTKTDVIKTFQSQANDTKQGITVFAPQDSAFAALNETVLSNLTTDQLRSLMLHHAMPSYYQLSAFSALAAASQVSMFAYKVNVTYAAGTIGVVSGWATAKLASSVYSTSPVAVYALNRVLLPKEIFPAAPEMAPVPAPAPAPGRGGKAMADAPGASERAASDNADAKSSSCRVVGAGSLALGYVVLLVSGLLMV

SEQ ID NO: 415 - DNA, 1080 bp, Triticum aestivum
ccacgcgtccgtgcacacccactgcctgcacacgtctacgtacaccatggcagccatgcagagacttgtgctccttctgtccgtggcgatcgcggcgtcggcgcagggcccggccgtggcgcccgcggcgccgacgacgcccacgaccccggcggcgcccgctccggcggccggcacgacgaacatcacgggggtgctggccaaggccgggcagttcaacaccttcatccggctgctcaagtcgacgggcgtggcggcgcagatcgacaaccagctcaacaacagcttcggcagcggcatgacggtgttcgcgcccaccgacaacgccttcacctcgctcgcctccggcacgctcaactcgctgtccgacagccagaagaacgcgctcatccagtaccacgtcctctccaccgccatccccatgtcgcagttcgacaccgtcagcaacccgctccgcacgcaggccggcagcacctcccccgcccagtacccgctcaacgtcaccgccgagggccagcaggtcaacatcaccaccggcgtcgtcaacgccaccgtcgacaacacgctctacaccggcgaccagctcgtcgtctaccaggtcaacaaggtgctcctgcccatggccatcgccggcacggccgcacccgcgcccgcgccgctcgcgcccaccaagaccaaggggaagacgcccacgtcgacggtcgccgacgcgcccgaggccgaagcgtcgacggacacgtcgctcgcggcgccggcacgggtggtcacactcacaggaggtggtgtcgtcgcggtggttcacgtgcttgccctggcctgcgtctggtgggggccgtgacagcgccgcgcccgatcagagtgtgagccccaacctgaggtctagatccatgcatcacaatctttttttgctcactttcttttcaaaggtgttggtctttttcgtttgatttgttctttttatttcagctcatttttatacctctgtaattgctagggacatgtaaagtgaaatgtactattacgggagtcacatttttatgtaatgttgttactaaataaatatacatatttttatagtgt

SEQ ID NO: 416 - protein, 263 aa, Triticum aestivum
MAAMQRLVLLLSVAIAASAQGPAVAPAAPTTPTTPAAPAPAAGTTNITGVLAKAGQFNTFIRLLKSTGVAAQIDNQLNNSFGSGMTVFAPTDNAFTSLASGTLNSLSDSQKNALIQYHVLSTAIPMSQFDTVSNPLRTQAGSTSPAQYPLNVTAEGQQVNITTGVVNATVDNTLYTGDQLVVYQVNKVLLPMAIAGTAAPAPAPLAPTKTKGKTPTSTVADAPEAEASTDTSLAAPARVVTLTGGGVVAVVHVLALACVWWGP

SEQ ID NO: 417 - DNA, 809 bp, Triticum aestivum
ccacgcgtccggcgtcggtcaccactgagctcggccatggcgggggcgcagctgcggcgcgtggtggccgtgctcctcctggcctgctgctgcagcatggcgccggcggcgacggcgagggggatgtcggcggggatcgcgcacaacatcacgtccttcctcagcggccacccggagtacaagcagtacaaccggtacctgacggagacgcgggtgtgcgacgagatcaacgcgcgcgcgggggtcacggtgctggtcctcggcgacggcgccatgtccacgctggtgtcggacgccggggcctacctgggcgccatcaagaacgcgctccgcctgcacgcgctgctcgactactgggacgtcaagaagctcaaggccctccccgcatgcgccgacacgctcaccgacacttataccatcccacgagtggcgccgtcacctgcacctcgggcaatggcaagataggcaagctgcacagagggacttacggatgacaccactgggatcgccccggaactaccaacagaaaaaggcatcccaagtgagtcaaatccaaaaaagaaaactttaatgggggttgttcaaaatatgctctctcaaaagaaaatcgtcccaattcatcgcccaggaaaaaaaagaatatatgggatccagcacctccggaaaaaaaaaatctgaaggaacgaatgtgccatctgctcctctaaaccgggtggaatatacaaacaccctgagtcagaaaaatggccaaactcgcttaatatgtgcatatttgcccaaggaaaacgcccaaccccaactccaggggg

SEQ ID NO: 418 - protein, 142 aa, Triticum aestivum
MAGAQLRRVVAVLLLACCCSMAPAATARGMSAGIAHNITSFLSGHPEYKQYNRYLTETRVCDEINARAGVTVLVLGDGAMSTLVSDAGAYLGAIKNALRLHALLDYWDVKKLKALPACADTLTDTYTIPRVAPSPAPRAMAR

SEQ ID NO: 419 - DNA, 1684 bp, Triticum aestivum
atgggtgcgccggcgtacggcgccgtgctcctcttcgcgctcgcgctggccgtggccgcgggagctgctgagacggcgcggccggaggaacccacattgcccgccgtggccgccgctggcggtggtggcgagggggtggtggccgcggcggcggccgtcgtcaacgcttccggggcgggggtgaactccaactcggtgctggtggcgctgctggactcgcactacacggagctggcggagctggtggagaaggcgctgctgctgcagacgctggaggacgccgtgggccgccacaacgtcaccatcttcgcgccccggaacgaggcgctggagcgggacctcgacccggagttcaagcgcttcctgctcgagccccgcaacctcaagtcgctccagacgctgctcctcttccacgtcctcccggcgcgccacccggcgggctcctggcccgccgcctcccaccccacgctctccggcgaggacgtcgagctcgccgccggcgccaacggatccatgcgcgtcgcccacgccgccgtcacccgccccgacgccgtgctcagccccgacggcgtcatccacggcatcgagcgcctcctcgtcccccgctccgtgcaggaggacttcaaccgccgccgcagcctcgccgcaatctcggccgtgctccccaccggcgcgcccgaggtagaccccaggacgcaccgcctcaagaagcccgcgccgccggtcctccccggcgcgccccccgtgctccccgtgtgggacgccatggcccccggcccctccatcgcccccgcgcccgcgcccggcccgggcaacgggaagcaccacttcgacggccacagccaggtcaaggacttcatccagaccctggtcctctacggcgggtacaacgagctggccgacatcctcgtcaacctcacctcgctggccaccgagatgggccggctggtgtcgaaggggtacgtgctgaccgtgctggcgcccaacgacgaggccatggcgcggctgaccacggaccagctgagcgagcccgggtcgccggagaacatcctgtactaccacatgatcccggagtaccagacggaggagagcatgtacaacgccgtccgccggttcggcaaggtgcggtacgacacgctgcggctgccgcacaaggtggtggcgcgggaggcggacggctccgtcaagttcgggcagggcgagggctccgcctacctcttcgacccggacatctacaccgacggcaggatctcggtgcagggcatcgacgccgtgctgctgccggaggacgacaagaagccggccacgccggtgtccgccccggacaggaaggcgcccgccgtccccggctccaggaagagcaagctcccgcgaggcaagttgttggaggcaacgtgcagaatggctggcgtcttcggtcagcgatcgcgattagcgagctgccagtagtaaaagaaaaaggatggaagggtttcggaaaattgatctcatgaaacccttgaaaccgaaacaccggcccgggaagaaggggacggcggggctttgggccctggtttttttcggaaccaccccctcccaaaatggttggcggtctttttttttggtatacaaattacaccaccaggaaaaattggggggggaggtaaaccgcgtgtttttgtgtgcctcgggaaaaaaaaaaaaa

SEQ ID NO: 420 - protein, 482 aa, Triticum aestivum
MGAPAYGAVLLFALALAVAAGAAETARPEEPTLPAVAAAGGGGEGVVAAAAAVVNASGAGVNSNSVLVALLDSHYTELAELVEKALLLQTLEDAVGRHNVTIFAPRNEALERDLDPEFKRFLLEPRNLKSLQTLLLFHVLPARHPAGSWPAASHPTLSGEDVELAAGANGSMRVAHAAVTRPDAVLSPDGVIHGIERLLVPRSVQEDFNRRRSLAAISAVLPTGAPEVDPRTHRLKKPAPPVLPGAPPVLPVWDAMAPGPSIAPAPAPGPGNGKHHFDGHSQVKDFIQTLVLYGGYNELADILVNLTSLATEMGRLVSKGYVLTVLAPNDEAMARLTTDQLSEPGSPENILYYHMIPEYQTEESMYNAVRRFGKVRYDTLRLPHKVVAREADGSVKFGQGEGSAYLFDPDIYTDGRISVQGIDAVLLPEDDKKPATPVSAPDRKAPAVPGSRKSKLPRGKLLEATCRMAGVFGQRSRLASCQ

SEQ ID NO: 421 - DNA, 895 bp, Triticum aestivum
  misc_feature (37)..(37): n is a, c, g, or t
acgcatgaccttaggcctatttaggtggacacttcgnaacaagggtgtacaaaaaagcaggttggcaccggtccggaattcccgggatatcgtcgacccacgcgtccgggccaaggccgggcacctcaacaccttcatccggctgctcaagtcgacgggcgtggcggcgcagatcgacaaccagctcaacaacagcttcggcagcggcatgacggtgttcgcgcccaccgacaacgccttcacctcgctcgcctccggcacgctcaactcgctgtccgacagccagaagaacgcgctcatccagtaccacgtcctctccaccgccatccccatgtcgcagttcgacaccgtcagcaacccgctccgcacgcaggccggcagcacctcccccgcccagtacccgctcaacgtcaccgccgagggccagcaggtcaacatcaccaccggcgtcgtcaacgccaccgtcgacaacacgctctacaccggcgaccagctcgtcgtctaccaggtcaacaaggtgctcctgcccatggccatcgccggcacggccgcacccgcgcccgcgccgctcgcgcccaccaagaccaaggggaagacgcccacgtcgacggtcgtcgacgcgcccgaggccgaagcggcgacggaaacgtcgctcgcggcgcccggaacgggtgggcccccctcccaggaggggggggtcctcgccgaggggtccccgtgctttgccccgggcctgccgtctggtgggggggcctggaccacgcccccccccgaatagaaggggggagccccacaccggaggccttaaaacactggcataacaaatcttttttttgggctaccttttctttttacaaaggggggggggacctttttcccgacaggaatttggtct

SEQ ID NO: 422 - protein, 257 aa, Triticum aestivum
MTLGLFRWTLRNKGVQKSRLAPVRNSRDIVDPRVRAKAGHLNTFIRLLKSTGVAAQIDNQLNNSFGSGMTVFAPTDNAFTSLASGTLNSLSDSQKNALIQYHVLSTAIPMSQFDTVSNPLRTQAGSTSPAQYPLNVTAEGQQVNITTGVVNATVDNTLYTGDQLVVYQVNKVLLPMAIAGTAAPAPAPLAPTKTKGKTPTSTVVDAPEAEAATETSLAAPGTGGPPSQEGGVLAEGSPCFAPGLPSGGGAWTTPPPE

SEQ ID NO: 423 - DNA, 1242 bp, Triticum aestivum
atggccgcaccttttctgctccttcttctgctcgtcgtttccggaggcgctgcagcgggcggcgacggcgaggcagggctgccccggctcgagttccgaggcatcgacgacacgggccgtaggcacgggcccttcgcgctggaggagccggagttcatgcgcgatatctccacgcacgacgacgaggcgggcgaagctccccagcttgagttccgaggcatcgacgactcaggccgtgggcacgcgtccgacgcgccggaggagccgttgttcatggcccatctcgacgacgaggcaggcgaagcgccccagctcgagttccgaggcatcgacggctcggtccatgggcacgcgtccgacgcgccggaggagcgggcgttcacggacgttatctccacgggcggcgcctgcgaccacttcgcccgcctcgtcgccgagacggggaacgcgagccagcttttctgggagcgcgccgcgggcgccggcggtctcacggtgttctgccctgaagacaaggccctcgccgagttcgagcccaagttccgaggcctcggcgcggacgaccggctcgccgtcctgctgtaccacggcgcggcgaccacctacggcaggaagctgttccagtcgttcgactgggtgtcggtgagctcgctggccaccgacgcggccaccaacaagagccacgccatcaacgtccgcgacgacggggacacggtgtggctgtggccgtcgtgcaggagtggcgctggggccagggtgaccaagacggtgtccgaagaagctcccctcgccgtctacgtcgtcgacgccgtgctgctgccgaaccacctgcgacagaagctggatggcggcgacgggccggctgctgcgtgcgagccgtccggtggctatttcggctggctgcactgctgcatcccggtctgggaagtgatagtcatggccgtggcgagcatcgcgggcttcctggccgggtttcttcttcatgatgcagtcgacaagatgagcaacaaggccaatttatctggttaagtttatctggttacactagtagtgaataatgctctagaattatggttgtgggtgtttagctcagcatatatatatatattgctgaaagcatgtcgatcgatcgcctgtcgtggcatggcacgtactcttctgccggagttaagtacgtgtgagttcctgtgtttggttcatgtgctacagcttaatttgcgtagcatgatttagtgtggcatt

SEQ ID NO: 424 - protein, 342 aa, Triticum aestivum
MAAPFLLLLLLVVSGGAAAGGDGEAGLPRLEFRGIDDTGRRHGPFALEEPEFMRDISTHDDEAGEAPQLEFRGIDDSGRGHASDAPEEPLFMAHLDDEAGEAPQLEFRGIDGSVHGHASDAPEERAFTDVISTGGACDHFARLVAETGNASQLFWERAAGAGGLTVFCPEDKALAEFEPKFRGLGADDRLAVLLYHGAATTYGRKLFQSFDWVSVSSLATDAATNKSHAINVRDDGDTVWLWPSCRSGAGARVTKTVSEEAPLAVYVVDAVLLPNHLRQKLDGGDGPAAACEPSGGYFGWLHCCIPVWEVIVMAVASIAGFLAGFLLHDAVDKMSNKANLSG

SEQ ID NO: 425 - DNA, 1096 bp, Triticum aestivum
ccacgcgtccgccccattcccacctcaccctgttcgtgctgccttcactgctcgcccgctctgcactcgctcagggattttgggcaaagcaggtgaccttcaggatgaagctcagagcaggcattttgcccgtggccatgctcgccattgccgtgctctcctccccagcattcgcgcagaagacgaagagcccccctgctccgccggcggccgtcctcccgccgtccccagcgccggcgccggcgccgcgccacgtggacctcgcggacctcctgagcgtggccggcccgttccacaccttcctggactacctccagaagaccaacgtcctggagacctttcagagcaaggcgaacgacaccaaggaggggatcaccatgttcgtgcccaaggactcggcgttcgcggcgctgaggacgacgacgttcgccaacctcaccagcgaccagctcaagtcgctgatgctgtaccacgcgctgcccaagtactactcgctggctgagttcaacaagctgagcagcctcaacccggtggccaccttcgcggggtcgcagtacacgctcaacctcaccgacaacatgggcagcatccggatcaagtccatgtggtccaaccccaagatcagcagcagcgtctactccacccgcccggtcgccgtctacgaggtcgacaaggtgctgctgccgatgcagatcttcaagagcgacccgccgctggccccggcgcccgcgcccgcccccgccgacgccaagtcctctgatgacgcgcctagcccggcgtcggggaagtcggcgagcgcgaaggccaaggcggggtccaagagcgcgtcgcaccgcgccggcgtcagtgtggccagttacctggcggtggctgtctccggtggcctgatgatgctcttgtgagcgagagactaatgagagaggtcagtggcggggttcatccgtgctgcttaatttttactacatggattgttgctgagttcattctttggacatagtaggcgttctgctaggatttgcatcatatatgcttctgtggttggtccttgttgatactacttgatatactactattttatttgtgcatgtatgcagag

SEQ ID NO: 426 - protein, 265 aa, Triticum aestivum
MKLRAGILPVAMLAIAVLSSPAFAQKTKSPPAPPAAVLPPSPAPAPAPRHVDLADLLSVAGPFHTFLDYLQKTNVLETFQSKANDTKEGITMFVPKDSAFAALRTTTFANLTSDQLKSLMLYHALPKYYSLAEFNKLSSLNPVATFAGSQYTLNLTDNMGSIRIKSMWSNPKISSSVYSTRPVAVYEVDKVLLPMQIFKSDPPLAPAPAPAPADAKSSDDAPSPASGKSASAKAKAGSKSASHRAGVSVASYLAVAVSGGLMMLL

SEQ ID NO: 427 - DNA, 1605 bp, Triticum aestivum
ccacgcgtccgctctcctcttctctctccccggcctctctctctctctgcctagtgctgatactgttgtgtcctcggcaatggcgaggagccggcagtccatcctcctggccttcgccgtcggagcaatggcggcggtgctgctggcctccccggcggcggccaagagctacaacatcaccaagatcctggcggcgcacccggagttctccaagttcaacgcgatgctgagcaagacgcggctcgcgtccgacatcaaccggcgccagaccatcaccgtgctggccctggacaactcggccatggcggcgctggaccactacacgctgcccaccgtccgccacatcctgtccctgcacgtcctcgtcgactactacggcaacaagaagctcaagcagctctcgcgcggcgccaccgcctccgcatccatgttccagtcgaccgggacggcgtcgggcatgtcgggctacgtgaacatcacgtcccacaagggcggcaaggtggagttcgtcagccaggacgccgacgacaccgtcaagccgtcccgctacgtcaagtccatcaaggagatcccctacgacatctcggtgctcgagatcaactccgtgctctcctcctccgaggccgaggcgcccgtcccgccgccggcgcccgtcgacctcatcgagctcctctccaagaagcactgcaagtcgttcgccgggctcatctccggcaacgccgacgtcttccgcacgctcaacgagaccaaggacaacggcctcaccctcttctgccccgtcgacgccgccgtggccgccttcatgcccaagtacaagaacctcacggccaaggccaagacggccatcctgctctaccacggcgtgccggactacttctcgctgcagctgctcaagtccaacaacggcatggtctccacgctcgccaccaccagcgaggtcaagaaggactacagctacgacgtgcagaacgacgacgagaaggtcaccctcgtcaccaaggtcgtcacctccaccgtcaccgccaccgtcggcgacagcgagccgctcgccgtctacgccgtctccaagttcttgaagccaaaggagctgttcaaggtcgcccaggcgccaacgcccgccccgtcaaagaagggcaagaaggaggctggcgacgacgacgactcgtctgacgacgaagattccgatgatgccaccactgataagggtgatgccgcgccagcggtatacgggcgatgggccaccgcggctgcgacggcgggagcagtattggcattgttgatggcctaaaagagtacgtaaaagccgccggctgttttatgcatgttcaaatttaattattacccctatatatttgttttccctttggtatttttaatcttcctttttctgcgggaaaatctctatcacttgttagtggtggtagaaacaaaataagtcggcggctggtctccttcaaacatctacaaaattcaagaaactagcttagaggtgcgatgtgtagtttctttttggagtcttgttgattgctagtatgatgtagttattttccttgtaattaatacagctggaatgttttcatgtatggtacccttctattgcgatat

SEQ ID NO: 428 - protein, 402 aa, Triticum aestivum
MARSRQSILLAFAVGAMAAVLLASPAAAKSYNITKILAAHPEFSKFNAMLSKTRLASDINRRQTITVLALDNSAMAALDHYTLPTVRHILSLHVLVDYYGNKKLKQLSRGATASASMFQSTGTASGMSGYVNITSHKGGKVEFVSQDADDTVKPSRYVKSIKEIPYDISVLEINSVLSSSEAEAPVPPPAPVDLIELLSKKHCKSFAGLISGNADVFRTLNETKDNGLTLFCPVDAAVAAFMPKYKNLTAKAKTAILLYHGVPDYFSLQLLKSNNGMVSTLATTSEVKKDYSYDVQNDDEKVTLVTKVVTSTVTATVGDSEPLAVYAVSKFLKPKELFKVAQAPTPAPSKKGKKEAGDDDDSSDDEDSDDATTDKGDAAPAVYGRWATAAATAGAVLALLMA

SEQ ID NO: 429 - DNA, 605 bp, Triticum aestivum
  misc_feature (338)..(338): n is a, c, g, or t
  misc_feature (520)..(520): n is a, c, g, or t
  misc_feature (524)..(525): n is a, c, g, or t
  misc_feature (568)..(568): n is a, c, g, or t
  misc_feature (577)..(577): n is a, c, g, or t
  misc_feature (590)..(590): n is a, c, g, or t
gctacacgagaggagcgcggtagtcctttcccggcgcgcagcggtgcactatggcgtccaccggagccgtcccctgctccgtcctcctgctcctcctcctctgcgcgtccccgctgtgccagggccaggccggacggcacaacatcacggagaccctcgccgccgccagcccggacttcgcccagttcagcgccgccctggccgccgcgaacctcagcgccgagatcgacgggcgcagccccgtcaccgtcctcgccgtcgacaacgccgccgtggcgcggctcggggagcggcgcctccagccggacgccctcgcgcgcgtgctctccctgcacgtnctcctcgactacctcggcgacgccaggctccgtaccctcgacggcgggttcaggcaggccgccagcctctaccaggcccacggcgcgccgggggccgccggcatcgtgaacatcacgcggggcggcaagggacgaccacggtctcgttcccggccaagcggaggggggtgaaacgggaccgnccgnncgtggtcctaccgtgaagtccggtcaaaggaggccgcccctgngaaacatcngccgtgcctgcanggtgaagcggacccc

SEQ ID NO: 430 - protein, 267 aa, Triticum aestivum
MTSSRRALILLAVVLAAVPAALSQKTTAPAPEAPETPDAPAAGTTPKAAAAPNVTAVLEKAGQYTKFIRLMASTQQDTQLNAQANDSDTGFTVFAPTDNAFNSLKPGTLNSLSQQDQVTLVQAHIIPTFYSMESFETASNPVRTQASGTDGPCTVNVTATSNSAVNVSTGIVHTTVGTALRATRPLAVYSVDKVLLPMDLFGPKPPASAPPAPGKKPSSAKGAAKAPSGDDEDEEEAPPAGAATAVGAGWRSLVAVVTAAATAACLL

SEQ ID NO: 431 - DNA, 1071 bp, Triticum aestivum
ccacgcgtccgcacagccagccagcgcctccatctagcaccactcctccagcaatgacgtcgtccaggagagccctcatcctgctggcggtggtgctggcggcggtgccggcggcgctgagccagaagacgacggccccggcgcccgaggcgcccgagacgccggacgcgcctgcggcggggacgacgcccaaggcggccgcggcgccgaacgtgacggcggtgctggagaaggccgggcagtacaccaagttcatccggctgatggcgtcgacgcagcaggacacgcagctgaacgcgcaggccaacgactccgacacgggcttcacggtgttcgcccccaccgacaacgccttcaacagcctcaagccgggcaccctcaactcgctctcgcagcaggaccaggtgacgctggtgcaggcccacatcatccccaccttctactccatggagtccttcgagaccgccagcaaccccgtccgcacccaggcctccggcaccgacgggccctgcaccgtcaacgtcaccgccaccagcaacagcgccgtcaacgtctccacggggatcgtccacaccaccgtcggcaccgcgctgcgcgccaccaggccgctcgccgtctactccgtcgacaaggtgctgctgcccatggacctcttcggccccaagcccccggcgtccgcgccgccggcccccggcaagaagccctcgtcggccaagggggcagccaaggccccctcgggcgacgacgaggacgaggaagaggccccgcccgccggagccgccacagccgtcggcgccggatggaggagcctcgtcgccgtggtgacagccgccgccaccgccgcgtgcctcttgtaagaagaagaaagtgcgagagaggatcatgattcgtgagaccgacagatcgatggagactagctgcgtgcatgttgtgcatggatttggataggttactagttcttgcattagtggctgcttcttctctctctttttttgttaaatgtccatttttgttctctttcttttcctcccctgttgatgggctaagatgcgataagatgttccactgttg

SEQ ID NO: 432 - protein, 152 aa, Triticum aestivum
MASTGAVPCSVLLLLLLCASPLCQGQAGRHNITETLAAASPDFAQFSAALAAANLSAEIDGRSPVTVLAVDNAAVARLGERRLQPDALARVLSLHVLLDYLGDARLRTLDGGFRQAASLYQAHGAPGAAGIVNITRGGKGRPRSRSRPSGGG

SEQ ID NO: 433 - DNA, 1114 bp, Triticum aestivum
atggccgcgccgtttctgctccttcttctgctcgtcgtctctgggggcgctgcagcgggcggcgacgacgaggcgtggctttcccggctcgagctccgaggcatcgatgacccgggcctgtgggcacccgttccgtcgccccggaggaggagggtgttcatggaccgttattatcccccaccgacgacgacgagggcgggcaaaaccccccaaactcgagttccggggcatcgacgattcgggccgtgggcaccgcgtccgtccccccggaggacccggtgttcacggcccgtgtctcccacggacgacgacgaaagcgcctcggctccagttccgaggcatcgacggctcggggccatgggcacgcgtccgaacgcgccgaaagcagcaggcgttcgtggaacgttatgtcccccaacggatgcgcgaggttcgcgggccctcctcgccgcgacggcgaacccgggcgagatcttccagcagcgcctcctcgacggccgcggccgcgggctcactgtcttctgccccgacgacctcgcggtggcgacgttcacgcccaagttcgacagcctgagcgccgacgaccagctcgccgtcctgcttcaccacggcgcgggggcgcgctaccggagggagcagttccaggcgttcgactgggtgtgggtgggctcgctggccaccgacgcggccaccaacaagagccacgccatcaccatccgcgacgacggggacacggtgcggctgtggccgtcgtgcgggagcggcgctggggtgaaggtgaccaagacggtgtccgaagaagccccctcgccgtgtacgtcgtcgacgccgtgctgctgccgagccacctgcgacagaagctggatggcggcgacgagccggctgctgcgtgcaagccgtgcggtggctatctccgctggctccactgctgcatcccggcctgggtaacgatactcgtggccgtgggcagcatggtctgcaccgtggtggggtttcttatcccgcaggactgctgccgcaggattcactgaacaacaacaagaaggccgctatgttagcggttaatttatctggttaagttcaaccgcactactgaataatcctcttacatctg

SEQ ID NO: 434 - protein, 315 aa, Triticum aestivum
MAAPFLLLLLLVVSGGAAAGGDDEAWLSRLELRGIDDPGLWAPVPSPRRRRVFMDRYYPPPTTTRAGKTPQTRVPGHRRFGPWAPRPSPRRTRCSRPVSPTDDDESASAPVPRHRRLGAMGTRPNAPKAAGVRGTLCPPTDARGSRALLAATANPGEIFQQRLLDGRGRGLTVFCPDDLAVATFTPKFDSLSADDQLAVLLHHGAGARYRREQFQAFDWVWVGSLATDAATNKSHAITIRDDGDTVRLWPSCGSGAGVKVTKTVSEEAPSPCTSSTPCCCRATCDRSWMAATSRLLRASRAVAISAGSTAASRPG

SEQ ID NO: 435 - DNA, 1081 bp, Triticum aestivum
ccccgggaggcgcacggatatcgtcgacccacgcgtccgagccacacagccagccagcgcctccatctagcaccactcctccagcaatgacgtcgtccaggagagccctcatcctgctggcggtgctgctggcggcggtgccggcggcgctgagccagaagtcgacggccccggcgcccgaggcgcccgagacgccggacgcgcctgcggcggggacgccgcccaaggcgtccgcggcgccgaacgtgacggcggtgctggagaagaacgggcagtacaccaagttcatccggctgatggcgtcgacgcagcaggacacgcagctgaacgcgcaggccaacgactccgacacgggcttcacggtgttcgcccccaccgacaacgccttcaacagcctcaagccgggcaccctcaactcgctctcgcagcaggaccaggtgacgctggtgcaggcccacatcatccccaccttctactccatggagtccttcgagaccgccagcaaccccgtccgcacccaggcctccggcaccgacgggccctgcaccgtcaacgtcaccgccaccagcaacagcgccgtcaacgtctccacggggatcgtccacaccaccgtcggcaccgcgctgcgcgccaccaggccgctcgccgtctactccgtcgacaaggtgctgctgcccatggacctcttcggccccaagcccccggcgtccgcgccgccggcccccggcaagaagccctcgtcggccaagggggcagccaagggcgccctcgggcgacgacgaggacgaggaagatgccccgcccgccggtgccgccaccgccgtcggcgccggatggaggagcctggtcgccgtggtggcagccgccaccgccgcgtgcctcttgtaagaagaagatcatggttcatgagaccgacagatcgatggagactagctgcgtgcgtgcatgttgtgcatggatttggatagcttacgagtagttcttggtggctgctgcttctcttctttcttttgttaaatgttcagttttgctgctctttttcttcttctcttgttattgaaccggcgagaaagtttgggct

SEQ ID NO: 436 - protein, 293 aa, Triticum aestivum
MTSSRRALILLAVLLAAVPAALSQKSTAPAPEAPETPDAPAAGTPPKASAAPNVTAVLEKNGQYTKFIRLMASTQQDTQLNAQANDSDTGFTVFAPTDNAFNSLKPGTLNSLSQQDQVTLVQAHIIPTFYSMESFETASNPVRTQASGTDGPCTVNVTATSNSAVNVSTGIVHTTVGTALRATRPLAVYSVDKVLLPMDLFGPKPPASAPPAPGKKPSSAKGAAKGALGRRRGRGRCPARRCRHRRRRRMEEPGRRGGSRHRRVPLVRRRSWFMRPTDRWRLAACVHVVHGFG

SEQ ID NO: 437 - DNA, 1029 bp, Triticum aestivum
acacaaagaacaagcagcacaaagcagcaatggaggcgcatatgcgatccatgacggccacctttctcctcgtgctcctctccctgtccgcagccgctccgtcagttcgtggccaggcggtggcggccgcgccggctccagcggcggctgccccgaagacgatcaaggcggtgctgaccaaggccgggcagttcaccaagttcctccagctgctgcagtcgacgcaggaggaggaacagatcgacacccagctcaagggcaaggcctccaccggcgccggcctcaccgtcttcgcgccgcccgacaacgccttcaccgcgctcaagtccggcaccctcaactccctctccgatcaacagaagacgtcgctggtgcagttccacgtggtctcccagctgctccccatggcgcagttcgacacggtgagcaacccgctgcgcacgcaggccggcgacaccggcaggggcaagtacccgctcaacgtcacgtccgacggcggcgggagggtgaacatctccaccggcgtcgtcaacgcctccgtcgacggcacgctctacaccggcgacaggctggtggtgtaccaggtggacaaggtgctgctgccgtgggcgctctacgggccgcccgtgcccgcgcccgtgccgtcgccggcggcggacaaggacaaaggacaagaagaaggccgggccggtggcggtggccgacgcgccggaggccgatacagccacggcgtccgcggcggcaccccgggagatgcggggcctcggcggcggtctctgcatggtggccgtcgccgtggccgccgcgtggtgtggcatgtgacgatcgaggaagagtggcggacagtcggatgttgccatgcattggatgttttgattttcccttttcttcgtcgagactcgagaagacgagaggtgctcgaatcgttcggtttgtttcggtgtggtgttcttccgttgggtttatgtttttccgtatgatccttgaaattgctgaaccttcgtaacgtttcgggcggtattttcctct

SEQ ID NO: 438 - protein, 298 aa, Triticum aestivum
MASTGAVPCSVLPLLLLCAFPLCQGQAGRHNITEILAAASPDFTQFSAALAGANLSAEIDARSPVTVLAVDNAAVARLAERRLQPDALARVLSLHVLLDYLGDARLRTLDGGFRQAASLYQAHGAPGAAGIVNITRGGKDDHVSFRPAEGVNGTAAVFYVKSVKEAPWDIAVLQVSDAISSFTAEAKVPTPPAPAPAPAPKAPAPAPAPLAPVVAPAPAKAPAALRPSPKNHTAPPPKPAKEPVPSPTPVVETPAEEPGADGDQPPADEHKSGASDSEPWSLGAVVAVAVPVVVFLLW

SEQ ID NO: 439 - DNA, 1172 bp, Triticum aestivum
cacgcgtccgagcgagcgacacgggaggagcgcgcgcggtagtagtccttccccggcgcgcagcggtgcaccatggcgtccaccggagccgtcccctgctccgtcctccccctgctgctcctctgcgcgttcccgctgtgccagggccaggccggacggcacaacatcacggagatcctcgccgccgccagcccggacttcacccagttcagcgccgccctggccggcgcgaacctcagcgccgagatcgacgcgcgcagccccgtcaccgtcctcgccgtcgacaacgccgccgtggcgcggctcgcggagcggcgcctccagccggacgccctcgcgcgcgtgctctccctgcacgtcctcctcgactacctcggcgacgccaggctccgcaccctcgacggcgggttcaggcaggccgccagcctctaccaggcccacggcgcgccgggggccgccggcatcgtgaacatcacgcggggcggcaaggacgaccacgtctcgttccggccagcggagggggtgaacgggacagccgccgtgttctacgtgaagtcggtcaaggaggcgccctgggacatcgccgtgctgcaggtgagcgacgccatctcgtccttcaccgccgaggcgaaggtgcccacgccgccggccccggccccggctcctgctcccaaggcgcctgcgcctgcgcctgctcctctggcgccggtcgtggcccctgcacctgctaaggccccggcggccctgcgtccgtcgccaaagaatcacaccgcgccaccgccgaagccggccaaagagcccgtgccttccccaacgcccgtggtggagacgccggcggaagaacctggggcggacggagaccagccgcctgccgacgagcacaagagtggcgccagcgactcggagccgtggagcctcggcgcggtggtggcggtggccgtgccggtcgtcgtgtttctgctgtggtgagcaatctgtgcttggaatgaatgcccgctgtcaggggcgctggatcccgcgattagtgctcgctcttacccgatggaaacagtggttaatgagcgctggttatcgctggcagatttgagcagaataattggacgatgctcgcgtttagtcaaggagtgcatggatatgtttgaattgttgctagtaatttatttctgcgttgc

SEQ ID NO: 440 - protein, 316 aa, Triticum aestivum
MEAHMRSMTATFLLVLLSLSAAAPSVRGQAVAAAPAPAAAAPKTIKAVLTKAGQFTKFLQLLQSTQEEEQIDTQLKGKASTGAGLTVFAPPDNAFTALKSGTLNSLSDQQKTSLVQFHVVSQLLPMAQFDTVSNPLRTQAGDTGRGKYPLNVTSDGGGRVNISTGVVNASVDGTLYTGDRLVVYQVDKVLLPWALYGPPVPAPVPSPAADKDKGQEEGRAGGGGRRAGGRYSHGVRGGTPGDAGPRRRSLHGGRRRGRRVVWHVTIEEEWRTVGCCHALDVLIFPFLRRDSRRREVLESFGLFRCGVLPLGLCFSV

SEQ ID NO: 441 - DNA, 897 bp, Triticum aestivum
gggcggccccgggtggaagctatgacattaggcctatttaggtgacttctagaacaagtttgtacaaaaaagcattctcgtaccggtccggaattcccgggatatcgtcgacccacgcgatccgcagtggtgctccgctctgctcagctcagcgccctccaccagtccgccccactccatcccgagctgagctgagccgccaccagcactagcggccaagctctagacgccggctgcctcaccgacgaggagaggataatggaggcgcggcggcggacgttgctggtggcgctggcggtgctggccctggcggcggcggcggcggaggggtacaacatcaccaagatcctggccgagtacccggagtactcgcagttcaacaagctgctgacgcagacgcggctggcgcaggacatcaacaagcgccgcaccatcaccgtgctcgtcgtggccaacggcgacatgggcggcctcgccggcgggggccgcacgctgcagaccatccgccacatgctccagattcacgtcctcgtcgactactacggcggcaagaagctccaccagcttgcccacggggtcaccgcatgctccaccatgttccaggattccggggcggccccccggcatgtccgggtacttgaacatcacgcagcaccgggggcgggcaaagggacctttcccggcggaaggatgccgaaagaaaaggagcccttacttccgcctttagtataggtcacttctagggaaaatccccctactaacactggggggtgcctcccaaaatcaaataaagtttgaaagggccctcccccgagaacggccgaaagtcccccctccgttagctggtcgaccaggtggtcccactagtctagaatcgcgcgccggtatacgctaccg

SEQ ID NO: 442 - protein, 429 aa, Triticum aestivum
MAAARRLLLLLAVTLAALAAAARAHNITDILDGYSEYSLYNNYLSQTKVCDEINGRSTVTCLVLTNGAMSSLAANLSLADVKNALRLLTLLDYYDPKKLHSLHGGSELTTTLYQTTGDASGDMGHVNITNLRGGKVGFASAEPGSKFQATYTKSVKEEPYNLSVLEVSDPITFPGLFTSPSAASTNLTALLEKAGCKRFARLIVSSGVVKTYQAAMDKGLTLFAPTDDAFQAKGLPDLGKLTSADLVALLEYHALPQYAPKASLKTMKGGIPTLASTGKGKYDLSVVAKGDDVSMDTGMDKSRVASTVLDDTPVTVHTVDSVLLPPELFGGAPSPAPGASVDAPASAPAPETSSAPAPSPKTDKTKPKHKSPAHSPPAPPADTPDTAPAESPDGDEEADKADNKNGATAVGMGIAAMVASVALVGATLL

SEQ ID NO: 443 - DNA, 1551 bp, Triticum aestivum
atggccgccgcccgccgcctcctcctcctcctggccgtgacccttgccgccctcgccgccgccgcccgcgcccacaacatcacggacatcctcgacggctactccgagtactcgctctacaacaactacctttcccagaccaaggtctgcgacgagatcaacggccgcagcaccgtcacctgcctcgtcctcaccaacggcgccatgtcctccctcgccgccaacctctccctcgccgacgtcaagaacgcgctccgcctcctcaccctcctcgactactacgaccccaagaagctgcactcgctccacggcggctccgagctcaccaccacgctctaccagaccaccggcgacgcctccggggacatgggccacgtcaacatcaccaacctccgcggcggcaaggtcggcttcgcctccgccgagcccggctccaagttccaggccacctacaccaagtccgtcaaggaggagccgtacaacctctccgtcctcgaggtctccgaccccatcaccttccccggcctcttcacctccccgtccgccgcctccaccaacctcaccgcgctcctcgagaaggccggctgcaagcgcttcgcgcgcctcatcgtgtcgtccggggtcgtcaagacgtaccaggcggccatggacaaggggctcaccctgttcgcgcccaccgacgacgcgttccaggccaagggcctgccggatctgggcaagctcaccagcgccgacctcgtggcgctgctggagtaccacgccttgccgcagtacgcgcccaaggcgtcgctcaagaccatgaagggcggcatcccgaccctggcctccaccggcaaggggaagtacgacctctccgtggttgccaagggcgacgacgtgtccatggacaccggcatggacaagtcccgcgtcgcgtccacggtgctcgacgacaccccggtgaccgtgcacacggtggacagcgtgctgctgccgccggagctcttcggcggcgcgccgtcgccggcacccggagcgtcggtcgatgcacctgcgtcggcccctgcaccagaaacctcctccgcgccggcgccctcgcccaagaccgacaagacgaaaccgaagcacaagtcgccagcgcattccccgcccgcgccgccggctgatacgcctgacacggcccccgccgagtcgccggacggagacgaggaggcggacaaggccgacaacaagaacggcgcgaccgcggtgggcatgggcattgcggccatggtggcctctgtcgctctggtcggcgcgacactcctctgatcagccccaagtgttcgacatcgagcacccgttctgttttcctcatgatgtgatcttggttgcgagttcgtgggccattgaaatgctcatccggagctgtacttcttcctggttggatcatttgggcgattgtgataccttccctggtagtttcactagctgcgtagttacaagtctattgagtttgattttgctatgatgctcgttccagttattttgatgcattgcatttaccaagaactccattccatatcctgatgc

SEQ ID NO: 444 - protein, 157 aa, Triticum aestivum
MEARRRTLLVALAVLALAAAAAEGYNITKILAEYPEYSQFNKLLTQTRLAQDINKRRTITVLVVANGDMGGLAGGGRTLQTIRHMLQIHVLVDYYGGKKLHQLAHGVTACSTMFQDSGAAPRHVRVLEHHAAPGAGKGTFPGGRMPKEKEPLLPPLV

SEQ ID NO: 445 - DNA, 1047 bp, Triticum aestivum
actcccacgccgacactcgccataatgcgccgcctccacctcgccgccgccgtcctcgccgtcttcctccccctcgccgtctccgcggccgggggcaaagcagcggcagctaaggcgcccgttgccccgccggccccgccgaacatcacggcggccatggcgaagggcgggtgcaaggcgttcgcggccctggtggcggcctcgccggacgcgcactccacgtgccagtcggccggggacggcggcgtgacggccttctgccccagcgacgacgccgtgaggtccttcatgcccaggtacaagaacctcagcgccgacggcaaggcgtcgctgctgctgttccacgccgtgcccgtgtactacgcgccgcggagcctcaagtccaacaacggcgtcatgaacacgctcgccaccgacggctccgccaacaacttcaacttcacggtgcagaacgagggcgagcaggtgaccatcaagacggacgcctccgaccacgccgcgcgggtcaagtccaccgtctacgacaaggaccccatcgccatctacgccgtggacacggtgctcgagccggtggagctcttcgagccggcggagtccccggcgccggcgccggctcccgcccctgtcgccgacgcgcccaaggcccccaagaagcaggcgcgccaccggcctgtagcggacgcgcccggaccggccgccgaggacgcggcgcccgccgaccagaggaagaactctaagaagagcgcggcgtccgccgccccgtgtctgccatgggccgcagtcctgcctgtcgtcgtggccgtggccgccgctctggcttagccgcttgtcctccttcgcggtggacctgcacgggaggtagtggtgtgtcggtggatggcgttgcgtgtgtcctttggggtctgtcggtcagtgcgtgtgctcgtgcagggaaatttctatctttactctttcttgccacattaatgttgtttagtataataatttgatgtgataaagcagtttgaatctcagtcagacctaaatattggaaaccgatggttttgc

SEQ ID NO: 446 - protein, 265 aa, Triticum aestivum
MRRLHLAAAVLAVFLPLAVSAAGGKAAAAKAPVAPPAPPNITAAMAKGGCKAFAALVAASPDAHSTCQSAGDGGVTAFCPSDDAVRSFMPRYKNLSADGKASLLLFHAVPVYYAPRSLKSNNGVMNTLATDGSANNFNFTVQNEGEQVTIKTDASDHAARVKSTVYDKDPIAIYAVDTVLEPVELFEPAESPAPAPAPAPVADAPKAPKKQARHRPVADAPGPAAEDAAPADQRKNSKKSAASAAPCLPWAAVLPVVVAVAAALA

SEQ ID NO: 447 - DNA, 1270 bp, Triticum aestivum
atgccacttctcggggccggagaagcacaaagggcgtcgctcgccggagccgcactagcctcctgcagcatcctgctcctcctgctcgtcccctgcgccccagggccaggggcaaccacccgaggcgccggaggaggcttgggccgaggggcaaccaccggaggcgtcggaggacgctttgacgatgctcttatccgatggcgggtgccgcgccttctccggcctctcgccatgacggccggcgtgggcgacgcgttccgcgagcagatcggcagcgatctggggctcaccatcctctgccctgacgacgaggcggtgggggcgttcatgccgaggttccataacctcaccgccgacgagcaggtcgcggttctcctgtaccacggcctgacgatggcttactctgaggagctgctcagctgggtgacccgggtccacggggagttctcgacgcttgatggggaggatatgctcaccatccgtcaccacagaggcaggctgatgctttcttcgtggccgccgtcgtcacgtaacaagaccaggatcaccaagacggtcgtcgacgacgaccatctcgccgtctacctcatagacgccgtgctgattccggcagatcccaagcctcaaatgtcgttctggggcgttttggcagttatcgtcgtccttctagtacttcttgtcgtcgggatcgcggcgatagtcctgctgtgtcatgcacttgtatatctttgttctcttctgccccggctgggaagatggtgtaagggtcgtgttgctgcctacgcttcggccgcccgtgtcactccacatgcgcaagggcaacaagaacactagtctgtggccgcttcggagtgcctcgactccctgggtcgttccctcgtgcttatttccgttcgtggtgacagatttcacggttgttttctccgtcttcgatgtatatagcggtgttcagcagggtggtggcatggtcagttgatgaaactgcaggatctagatcgtgttatttttctatgcatataataaacttatatatatcttatgccgggaacactttctatgtatttagtgtttactttacttatggatctaggcttcgtttgatgtaacgaaatgctggtgaccatgagttcgatatgtagtggagtaggagtagcattggaacttctattgcaagcatccgtccatggggttgcattagatgagggaggagttccattttattatgcaccatagttactttcaacagctttcagaaaaacaaaaaaaaaaa

SEQ ID NO: 448 - protein, 277 aa, Triticum aestivum
MPLLGAGEAQRASLAGAALASCSILLLLLVPCAPGPGATTRGAGGGLGRGATTGGVGGRFDDALIRWRVPRLLRPLAMTAGVGDAFREQIGSDLGLTILCPDDEAVGAFMPRFHNLTADEQVAVLLYHGLTMAYSEELLSWVTRVHGEFSTLDGEDMLTIRHHRGRLMLSSWPPSSRNKTRITKTVVDDDHLAVYLIDAVLIPADPKPQMSFWGVLAVIVVLLVLLVVGIAAIVLLCHALVYLCSLLPRLGRWCKGRVAAYASAARVTPHAQGQQEH

SEQ ID NO: 449 - DNA, 1369 bp, Triticum aestivum
ccacgcgtccgggcagccgcgatggccgcaccttttctgctcgttcttctgctcgtcgtttctggaggcgctgcagcgggcggcgacggcgaggcagggctgaccaggctcgcgctccgaggcatcgacgacccgggccgtaggcacgggcccttcgcgctggaggagccggagttcatgcccgagatctccacgcacgacgacgaggcgggcgaagctccccagcttgagttccgaggcatcgacgactcaggccgtgggcacgcgtccgacgcgccggacgagccggtgttcatggcccacctcgacgacgagccgggcgaagcgccccggctcaagttccggggcatcgacggctcgggcatagacgaggagcctgtgctcatggacgacgacgaagcgcccgggctcgagttccgaggcatcgacgactccggccatgggcgcgcatccgacgcgccggaggagcgggcgttcacggacgttatctccacgggcggcgcctgcgaccacttcgcccgcctcgtcgccgagacggggaacgcgacccagctcttctgggagcgcgccgcgggcgccggcggcctcacggtgttctgccccgaagacaaagccctggccgagttcgagccgaagttccgaagcctcggcgccgacgaccggctcgccgtcctgctgtaccacggcgcggcgaccacctacggcaggaagttgttccaggcgttcgactgggtgtcggtgagctcgctggccaccgacgcggccaccaacaagagccacgccatcaccgtccgcgacgacggggacacggtgtggctgtggccgtcgtgcaggagtggcgctggggccagggtgaccaagacggtgtccgaagaagctcccctcgccgtctacgtcgtcgacgccgtgctgctgccgaactacctgcgacagaagctggatggcggcgacgggccggctgctgcgtgcgagccgtccggtggctatttcggctggctgcactgctgcatcccggtctgggaagtgatagtcatggccgtggcgagcatcgcgggcttcctggccgggtttcttcttcatgatgcagtcgacaagatgagcaacaaggccaatttatctggttaagtttatctggttacactagtagtgaataatgctctagaattatggttgtggtgtttagctcagcatatatattgctgaagcatgtcgatcgatcgcctgtcgtacgtggcatggcacgtactcttctgccggagttaagtacgtgtgagttcctgtgtttggttcatgtgctacagcttaatttgcgtagcatgatttagtgtggcatttacgtcgtctttgacgttttctccctaaaaaaaaa

SEQ ID NO: 450 - protein, 367 aa, Triticum aestivum
MAAPFLLVLLLVVSGGAAAGGDGEAGLTRLALRGIDDPGRRHGPFALEEPEFMPEISTHDDEAGEAPQLEFRGIDDSGRGHASDAPDEPVFMAHLDDEPGEAPRLKFRGIDGSGIDEEPVLMDDDEAPGLEFRGIDDSGHGRASDAPEERAFTDVISTGGACDHFARLVAETGNATQLFWERAAGAGGLTVFCPEDKALAEFEPKFRSLGADDRLAVLLYHGAATTYGRKLFQAFDWVSVSSLATDAATNKSHAITVRDDGDTVWLWPSCRSGAGARVTKTVSEEAPLAVYVVDAVLLPNYLRQKLDGGDGPAAACEPSGGYFGWLHCCIPVWEVIVMAVASIAGFLAGFLLHDAVDKMSNKANLSG

SEQ ID NO: 451 - DNA, 1028 bp, Triticum aestivum
  misc_feature (816)..(816): n is a, c, g, or t
gacttaaaatgcactgcctcgttataatctttcttacctcaaacacagaaattcaatcacataactcaatcttaacaaaccgccaacaaggcaagaacaagaatggaacaaaggaatttgaacagggtggaagaaaggaaagaaacaccaaagacaaggaaatccatcgagtctatgcacattgattgatggccatggcgtcccggtcgtcgtgcgatcatcccaagctacccatctcacaagaggtagccaagaagggcggccatgccagccatgccccaaccgacggccctggcgcccgcggcgccagtgggcgcggcgtcgtcgtctgacgcggccggcccggaggcggcttcacccttcttggtcttggcccccttgggggcggcgggcgccggcgccggcgccttggccccgaacagcgcttggggcaggagcaccttgtcgaccgagtagacggcgagcggcttgacggcgctgagcgcgttgttgacggcgacctcgacgaggccggtggtgacgttgacctggttgttggtggcgacgatgttgaccgtgatgggctccttctcgccggaggactgggtgcggacggggttgctggccgtctggaaggactccatggtgtagtactggggcaggatgtgggcctggaccagcgacacctgctgctgctgggtgaggctgttgagcgtgccgggcttgaggttgttcaacgcgttgtcggtgggctcgaacacggtgtaaccgctgccgttgaacgaattgttgagctggctgttgagctgattctcctgctgcctctccttcatcaanccgattaaggtcgtgtctggcccgcccttccccaaggatggccggcactttcggggggccggccggggttcttaaaagggccagggccctgtgcctgggaaaaccgccccaggggcaaaaagcgcgcgccaaaaaaaaaaaaaacccctcccccccgccccttgtgttgtgggccctagaccggggcttctctctaaaacaagagagtggga

SEQ ID NO: 452 - protein, 191 aa, Triticum aestivum
MKERQQENQLNSQLNNSFNGSGYTVFEPTDNALNNLKPGTLNSLTQQQQVSLVQAHILPQYYTMESFQTASNPVRTQSSGEKEPITVNIVATNNQVNVTTGLVEVAVNNALSAVKPLAVYSVDKVLLPQALFGAKAPAPAPAAPKGAKTKKGEAASGPAASDDDAAPTGAAGARAVGWGMAGMAALLGYLL

SEQ ID NO: 453 - DNA, 1267 bp, Triticum aestivum
gctaggcatagccagaagccactcaagcaactcccctccctcgcgctctcttggtgcaggcgcgatggccgcaccttttctgctccttcttctgctcgtcgtttctggaggcgctgcagcgggcggcgacggcgaggcagggctgacccggctcgagctccgaggcatcgacgacacgggccgtaggcacgggcccttcgcgctggaggagccggagttcatgcccgttatctccacgcacgacgacgaggcggtcgaagctccccggcttgagttccgaggcatcgacgactcgggccgtgggcacgcgtccgacgcgccggaggagccggtgttcatggcccatctcgacgacgaggcgggcgaagcgccccggctcgagttccggggtatcgacggctcgggccatgggcacgcgtccgacgcgccggaggagcgggcgttcacggacgtcatctccacgggcggcgcctgcggccgcttcgccccgcctcgtcgccgagacggggaacgcgggccagctcttctgggagcgcgccgcgggcgccggcggtatcacggtgttctgccccgaagacaaggtccttgccgagttcgagcccaagttcagaagcctcggcgccgacgaccggctcgccgtcctgctgtaccacggcgcggcggtgtgctaccggagggagcagttccgggcgttcgactgggtgtcagtgagctcgctggccaccaacgcggccacaaacaagagccacgccatcaccatccgcggcgacggggacacagtgcggctgtggccgtcgtgcgcgagcggcgctggggtcagggtgaccaagacggtgtccgaagaggcccccctcgccgtgtacgtcatcgacgccgtgctgctgccgagccacctgcgacagaagctggatgtcggcgaagagcgggctgctgcgtgcaagccgtccggcggctatctcgactggctgcactcctgcatcccggcatgggcaatgatagccatggccttggcgagcatcctgggcttccatgccggggtttttcttcacgatgtactgaacaagaacaaggaggccaatttatctggttattaagtttatctgcactagtagtgaataaggttgtgatttgcgcatgatcgagtatgtgtttagctcagcatatacagattgctgcagcatgatcgagtatgtgtttccttctgccggagttaagtgtgtttggctcatatgccacagcttaatttgcataacatgattagtgcggc

SEQ ID NO: 454 - protein, 228 aa, Triticum aestivum
MGTRPTRRRSGRSRTSSPRAAPAAASPRLVAETGNAGQLFWERAAGAGGITVFCPEDKVLAEFEPKFRSLGADDRLAVLLYHGAAVCYRREQFRAFDWVSVSSLATNAATNKSHAITIRGDGDTVRLWPSCASGAGVRVTKTVSEEAPLAVYVIDAVLLPSHLRQKLDVGEERAAACKPSGGYLDWLHSCIPAWAMIAMALASILGFHAGVFLHDVLNKNKEANLSGY

SEQ ID NO: 455 - DNA, 1704 bp, Triticum aestivum
atgggtgcgccggcgtacggcgccgtgctcctcttcgccctcgcgctggccgcgggcgccgccgccgctgagaccgcgcggccggaggaacccacattgcccgccgctgctggcggtggtggcgacggggtggtggtggcggccgcggcggtcgtcaacgggtccggggcgggggtgaactccaactcggtgctggtggcgctgctggactcgcactacacggagctggcggagctggtggagaaggcgctgctgctgcagacgctggaggacgccgtgggccgccacaacgtcaccatcttcgcgccccgcaacgaggcgctggagcgggacctcgacccggagttcaagcgcttcctgctcgagccccgcaacctcaagtcgctccagacgctgctcctcttccacgtcctcccggcgcgccacccggcgggctcctggcccgcggcctcccaccccacgctctccggcgaggacgtcgagctcgccgccggcgccaacggatccatgcgcgtcgcccacgccgccgtcacccgccccgacgccgtgctcaggcccgacggcgtcatccacggcatcgagcgcctcctcgtcccccgctccgtgcaggaggacttcaaccgccgccgcagcctcgccgcaatctcggccgtgctccccaccggcgcgcccgaggtagaccccaggacgcaccgcctcaagaagcccgcgccgccggtcctccccggcgcgccccccgtgctccccgtgtgggacgccatggcccccgggcccctccatcgcccccgcgcccgcgccgggcccgggcaacgggaagcaccacttcgacggccacagccaggtcaaggacttcatccagaccctggtcctctacggcgggtacaacgagctggccgacatcctcgtcaacctcacctcgctggccaccgagatgggccggctggtgtcggaggggtacgtgctgaccgtgctggcgcccaacgacgaggccatggcgcggctgaccacggaccagctgagcgagcccgggtcgccggagaacatcctgtactaccacatgatcccggagtaccagacggaggagagcatgtacaacgccgtccgccggttcggcaaggtgcggtacgacacgctgcggctgccgcacaaggtggtggcgcgggaggcggacggctccgtcaagttcgggcagggcgagggctccgcctacctcttcgacccggacatctacaccgacggcaggatctcggtgcagggcatcgacgccgtgctgctgccggaggacgacaagaagccggccacgccggtgtccgccccggacaggaaggcgcccgccgtcaccggctccaggaagagcaagctccggcgaggcaagttgttggaggcaacgtgcagaatggctggcgtcttcggtcagcgtcgcgattagcgagctgccagtagaaggagaaggatggaaggattcggaagattgatctcatgattggttgacaccgaaacacggcccggaacgaggtgacggcggggctctggcacctgctttgttcggagccagccgtccacgatattgtttgctgttcttttttttgtttattactattatactactatggaataattggtggggaatgtaaaaccggtggttgttggtgtgcccaaggaagaagaaaaaagaattgtttatactcgaaaaaaaaaaaaaaa

SEQ ID NO: 456 - protein, 480 aa, Triticum aestivum
MGAPAYGAVLLFALALAAGAAAAETARPEEPTLPAAAGGGGDGVVVAAAAVVNGSGAGVNSNSVLVALLDSHYTELAELVEKALLLQTLEDAVGRHNVTIFAPRNEALERDLDPEFKRFLLEPRNLKSLQTLLLFHVLPARHPAGSWPAASHPTLSGEDVELAAGANGSMRVAHAAVTRPDAVLRPDGVIHGIERLLVPRSVQEDFNRRRSLAAISAVLPTGAPEVDPRTHRLKKPAPPVLPGAPPVLPVWDAMAPGPLHRPRARAGPGQREAPLRRPQPGQGLHPDPGPLRRVQRAGRHPRQPHLAGHRDGPAGVGGVRADRAGAQRRGHGAADHGPAERARVAGEHPVLPHDPGVPDGGEHVQRRPPVRQGAVRHAAAAAQGGGAGGGRLRQVRAGRGLRLPLRPGHLHRRQDLGAGHRRRAAAGGRQEAGHAGVRPGQEGARRHRLQEEQAPARQVVGGNVQNGWRLRSASRLASCQ

SEQ ID NO: 457 - DNA, 1018 bp, Triticum aestivum
accgtagccactcagcaactccgtgcatctcacgccctcttagctagctcgtgccagcgcgcgatggccgcgccgtttctgctccttcttctgctcgtcgtctctgggggcgctgcagcgggcggcgacgacgaggcgtggctttcccggctcgagctccgaggcatcgatgacccgggccgtgggcacgcgtccgtcgcgccggaggaggaggtgttcatggacgttattatcgccactgacgacgacgaggcgggcgaaacgccccgactcgagttccgtggcatcgacgattcgggccgtgggcacgcgtccgtcgcgccggaggagccggtgttcacggcccgtgtctccacggacgacgacgaagcgcctcggctccagttccgaggcatcgacggctcgggccatgggcacgcgtccgacgcgccgaagcagcaggcgttcgtggacgttatgtccgccaacggatgcgcgaggttcgcgggcctcctcgccgcgacggcgaacgcgggcgagatcttccagcagcgcctcctcgacggccgcggccgcgggctcactgtcttctgccccgacgacctcgcggtggcgacgttcacgcccaagttcgacagcctgagcgccgacgaccagctcgccgtcctgcttcaccacggcgcgggggcgcgctaccggagggagcagttccaggcgtccgactgggtgtgggtgggctcgctggccaccgacgcggccaccaccaagagccacgccatcaacatccggggaggacggggacccggtgcggctgtggccgtcgtgcgggaaccgcccttgggttgaaggttacaaaaacggtggtcccgagaacccccctcgccggttatctttgttcaaccccgtcttggtgccgacccacctgcgaaaaaaacctggaatggggggaacaacccggttgctgcttgcaaaccgggggggggggatattcccggtgggctccaatgtgtgaattccggccttgggaaaaaaaatctct

SEQ ID NO: 458 - protein, 253 aa, Triticum aestivum
MAAPFLLLLLLVVSGGAAAGGDDEAWLSRLELRGIDDPGRGHASVAPEEEVFMDVIIATDDDEAGETPRLEFRGIDDSGRGHASVAPEEPVFTARVSTDDDEAPRLQFRGIDGSGHGHASDAPKQQAFVDVMSANGCARFAGLLAATANAGEIFQQRLLDGRGRGLTVFCPDDLAVATFTPKFDSLSADDQLAVLLHHGAGARYRREQFQASDWVWVGSLATDAATTKSHAINIRGGRGPGAAVAVVREPPLG

SEQ ID NO: 459 - DNA, 1024 bp, Triticum aestivum
agagaaggcaagcaagtggtggtgaccatggagttcaaagcggccgttttcaccgccgccgtgctggccgtgctcctctgctccccggcatcggcccagaagagtccgcccgcgccagcgccggtgtccgtgtcaatcccgccgtccctcgcgccggcgccggccccggccccgcgctacgtggacctggcggcgctcctcgacgtggccggcccgttccacaccttcctcggctacctgcagaagacgaaggtgatcgagaccttccaggcccaggccaacaagaccgacgagggcatcaccatcttcgtccccaaggactcggccttcgcggcgctcaagaagtccaccttctccaacctcaccggcgaccagctcaagacgctgctcctctaccacgccttccccaagtactacccgctggcgcagttcaggaacctcagctcgctcaacccggtgaacaccttcgccggctcgccctacacgctcaacctcaccgacgacatgggcagcatcagcgtcgagtccatgtggtccaagcccaagatctccagcagcgtctacgccaccaagcccatcgccgtctactccatcaacaaggtgctcctgcccatgcagctcttcagcaaggacccgccgctggcgccggcgccggcgcccgcgccggagtcaggggcgtcggacatcgcccccagcccggacggcggcaaagcgggcgcccggaacggcaaggcggactcgacgagcgccgggcatgtcggtgccgcgaattgcttggggctgctggctgccgcggcaggtggcttgatgctcctgtggtgagagagaacacatggatggatggttcctgtcatttgtaagcacttgaatttgattttgagctggttgatgggaggcattcttttggacatagtaggaatgatgttaggattgagtcggagtattttacatcatattactctcataatcatgatcattactcataaattgacggatgaatatcgaaagaggtttcgtcaccttt

SEQ ID NO: 460 - protein, 264 aa, Triticum aestivum
MEFKAAVFTAAVLAVLLCSPASAQKSPPAPAPVSVSIPPSLAPAPAPAPRYVDLAALLDVAGPFHTFLGYLQKTKVIETFQAQANKTDEGITIFVPKDSAFAALKKSTFSNLTGDQLKTLLLYHAFPKYYPLAQFRNLSSLNPVNTFAGSPYTLNLTDDMGSISVESMWSKPKISSSVYATKPIAVYSINKVLLPMQLFSKDPPLAPAPAPAPESGASDIAPSPDGGKAGARNGKADSTSAGHVGAANCLGLLAAAAGGLMLLW

SEQ ID NO: 461 - DNA, 1692 bp, Triticum aestivum
atgggcgcgccgctcttcgtcgccgtcctcctctgcctggtactcgccgcggcggcggtgcagcagcccacattgccctcctcttcagcggccaacagctccacgggggtgaactccaactcggtgctggtggcgctgctggactcgcactacacggagctggcggagctggtggagaaggcgctgctgctgcagtcgctggaggacgccgtggggcggggcaacgtcaccatcttcgcgccccggaacgaggccctcgagcgggacctcgacccggagttccgcgccttcctccttgagccccgcaacctgcgctccctccagcgcctgctcctcttccacgtcctcccctcccgcctgcactcgcactccgcctggcccgcctccaccgcgcggatgacgctctccggcgagcacctccagctgtcagccgacggccagaagatgctagtcggcaccgcggaggtcacgcggccggacgcggtggtgaggcccgacggggtcatccacggcatcgagcggctgctggtgccgcgctcagttcaggaggatttcaaccgccgccgcagcctggctgccatctcggccgtgctccccacgggcgcccccgaggtggaccccaggacgcacaggctgaaaaagcccgcgccgcccgtgcccctcggcgcgccgcccgtgctgccggtctgggacgccatggcccccggcccttccattgcgccggcgccggcccccggccccggatccgggaagcaccacttcgacgggcacagccaggtcaaggacttcatccagacgctggtcctgtacggcgggtacaacgagctcgcggatatcctggtgaacctgacgtcgctggcgacggagatggggcggctggtctcggaggggtatgtgctcacagtgctggcccccaatgacgaggccatggcacggctgaccacggaccagctgagcgagcccgggtcgccggagaacatcctctactaccacatggtccccgagtaccagacggaggagagcatgtacaacgccgtgcggaggttcgggacggtgaggtacgacacgctgcggctgccgcagaaggtgacggcgagggaggcggacgggtcggtcaagttcgggcacggcgaggggtccgcctacctcttcgatccggatatctacaccgacgggaggatctctgtgcagggcatcgacgcagtgctcttcccgccggtggaggacacggccaagagcggcggcgcctcgcccgtgaggaaggcccccgccgtcaccggcacggccaagcccaagctccgacgagggaagttgttggaaggggcgtgccatgtcgcggctgtcttcggtgggcgatcacacttcacgagctgccagtagatcatggccgatgatggcgaccacggatgtctccctagctgctttgcttgcctcctgaggctcaaagatgaacatgaacccaagtactagtatcatgctgagttttggttaataaggctagcgaggaagggagagctggtggttttgcttgtttggccatcaggaaattaggagaaaaaaaggtggatggaaatttgtttatacgggagatcagatcgacatcagtgtatagcaatttttttcttcttctttatttgtttgatttgtggtctaagatgctacatactttatggcgaaacaaagggaattccc

SEQ ID NO: 462 - protein, 459 aa, Triticum aestivum
MGAPLFVAVLLCLVLAAAAVQQPTLPSSSAANSSTGVNSNSVLVALLDSHYTELAELVEKALLLQSLEDAVGRGNVTIFAPRNEALERDLDPEFRAFLLEPRNLRSLQRLLLFHVLPSRLHSHSAWPASTARMTLSGEHLQLSADGQKMLVGTAEVTRPDAVVRPDGVIHGIERLLVPRSVQEDFNRRRSLAAISAVLPTGAPEVDPRTHRLKKPAPPVPLGAPPVLPVWDAMAPGPSIAPAPAPGPGSGKHHFDGHSQVKDFIQTLVLYGGYNELADILVNLTSLATEMGRLVSEGYVLTVLAPNDEAMARLTTDQLSEPGSPENILYYHMVPEYQTEESMYNAVRRFGTVRYDTLRLPQKVTAREADGSVKFGHGEGSAYLFDPDIYTDGRISVQGIDAVLFPPVEDTAKSGGASPVRKAPAVTGTAKPKLRRGKLLEGACHVAAVFGGRSHFTSCQ

SEQ ID NO: 463 - DNA, 1117 bp, Triticum aestivum
  misc_feature (61)..(61): n is a, c, g, or t
  misc_feature (1117)..(1117): n is a, c, g, or t
atgatacaaccgagtctgggtcttgggcagaggaaagcggacttggttggaggagatgagnacccgcctgtaccccccccgcttttttctggaaccgccattgtttaggagcggccccacccgagcccccagccatggcggcgagggagcgggcattgtcgtcgtggcggcggcgctcttggccctggtggcggtgtcccaggcgacaggcgcctggccccttcagcgacgaccgggccggccccccggaacgtaacgcccatcctggtgaaaggccgggcagtacacgaccttcatgcggctgatgaaggagacgcagcaggacacgcagctcaacagccagctcaacaactccttcaacggcaacggctacaccgtgttcgcgcccaccgacaacgccttcaacaacctcaagcccggcacgctcaacagcctcacccagcagcagcaggtgtcgctggtccaggcccacatcctgccccagtactacaccatggagtccttccagacggccagcaaccccgtccgcacccaggcctccggcgagaaggagcccatcacggtcaacatcgtcgccaccaacaaccaggtcaacgtcaccaccggcctcgtcgaggtcgccgtcaacaacgcgctcagcgccgtcaagccgctcgccgtctactcgctcgacaaggtgctcctgccccaagcgctgttcggggccaaggcgccggcgccggcgcccgccgcccccaagggggccaagaccaagaagggtgaagccgcctccgggccggccgcgtcagacgacgaagcgacgcccacgggcgccgcgggcgccagggccgtcagttggggcgtggctggcatggccgcccttcttggctacctcttgtgagatgggtagcttgggatgatcgcacgacgaccgggacgccatggccatcaatcaatgtgcatagacttgatgggtttccttgtctttggtgtttctttcctttcttccaccctgttcaaattcctttgttccattcttgttcctgccttgtcggcggtttgttaagattgagttatgtgattgaatttatgtgtttgaggtaagaatgttaataacgacgcagtgcattttgaatan

SEQ ID NO: 464 - protein, 194 aa, Triticum aestivum
MRLMKETQQDTQLNSQLNNSFNGNGYTVFAPTDNAFNNLKPGTLNSLTQQQQVSLVQAHILPQYYTMESFQTASNPVRTQASGEKEPITVNIVATNNQVNVTTGLVEVAVNNALSAVKPLAVYSLDKVLLPQALFGAKAPAPAPAAPKGAKTKKGEAASGPAASDDEATPTGAAGARAVSWGVAGMAALLGYLL

SEQ ID NO: 465 - DNA, 1519 bp, Triticum aestivum
atgcgggggcaggggcagatctcccgccggctggtcgtgcttgcggcggtggccgggctgctgctgctggcgtgggcgccgggtgcggctgccgtggacgtccaggcggtgctcgccccgttccccgacctcgccggcttcgcgcgcctgctcgcgtccagccccgtggcccgggagctggccgggcggtcctcgctgacgctgctcgccgtgcccaacgccgacctcccccagtcgccctcggcgttcgcggccgccgcgggcgccgacctcgccgacgtgctccgctaccacgtcctcctcgagtacctctcccccgccgacctccgccgcctcccggccgccgggaagctggtcaccacgctgttccagaccaccggccgcgcctccgccgacctcggcgccgtcaacgtcacggccgccgggcccagcctcggcgtcgtccgctcgcccgcgcccttccccgggtccaacgccaccgtgctcggctccgtcacctccgtgccgtacaacctcagcgtgctggccgtggacggcctcatcgcgccctccggcttcgacctggcggcctccgagtcccgcccccccgccgccgtcaacatcacccgcgtcctcgccgaagcgcgcgggttcaacggggcggcgtccatgctggaggcctccggcgtggcggaggagttcgagggcgacgagcgcggcgcgggcatcacggtgttcgtccccaccgacgacgccttcgccagcctccccgccggcgaccggctccagtccctccccgccgaccgcaaggccgtggtgctccgcttccacgtcctccactcctactacccgctagggtcgctggagtcgatcgtgaacccgctgcagccgaccctggccaccgagtacgccagccaggccggccgcttcaccctcaacatcacccgctccaacggctccgtggccatcgacaccggcgtcgtccaggccaccatcacgcgcaccgtcttcgaccagaaccccgtcgccgtcttcgccgtctccaaggtgctgctccccaaggagatgttcaccagggccgactcggccgccgtcgtcgccgcggccctggcgcccccgccggcggccgccagctcgatgccgccggagccgcccgagagcgcgcggacgccgccgacgaagctgtcctcgccccccgcgctgcgcggcggggccaggaacggcaccgcggtttcgccgccgtcgtcgtcggcggcaaaggcaacggcaactgggcggtggtgtatagcattgttgtatgtactaccagcactgctgcctctggtatgaggatccggtggtgagctagtccgtccattgccgtctccttgctgagctcgattcttttttgccatactttggtcaccattgtttcttctttgttttactgctatatatattactaggagtgaacctgtacacaatgcatttggaaaggggggagaagctagatgactcgagtcgaggtgtgaggaagattgtgctgcaaaaaaaaaaaaaa

SEQ ID NO: 466 - protein, 435 aa, Triticum aestivum
MRGQGQISRRLVVLAAVAGLLLLAWAPGAAAVDVQAVLAPFPDLAGFARLLASSPVARELAGRSSLTLLAVPNADLPQSPSAFAAAAGADLADVLRYHVLLEYLSPADLRRLPAAGKLVTTLFQTTGRASADLGAVNVTAAGPSLGVVRSPAPFPGSNATVLGSVTSVPYNLSVLAVDGLIAPSGFDLAASESRPPAAVNITRVLAEARGFNGAASMLEASGVAEEFEGDERGAGITVFVPTDDAFASLPAGDRLQSLPADRKAVVLRFHVLHSYYPLGSLESIVNPLQPTLATEYASQAGRFTLNITRSNGSVAIDTGVVQATITRTVFDQNPVAVFAVSKVLLPKEMFTRADSAAVVAAALAPPPAAASSMPPEPPESARTPPTKLSSPPALRGGARNGTAVSPPSSSAAKATATGRWCIALLYVLPALLPLV

SEQ ID NO: 467 - DNA, 1163 bp, Triticum aestivum
  misc_feature (1131)..(1134): n is a, c, g, or t
gcacgaggatcatggttaacactaacccagaccagccagtctgttaccatcttcccttcccatctcgcctcctcacacagctccaaaacccccagctccattcccatccccagttatatatcacatcaccttcccctgctttcagcactcctccacactcttaagctaagctaagcaagccagcatctcgatctactcttcctccagcaatggcgtcgtccaggagagccctcatcctgctggccgtcgtgctggcggcggtgccggcggcgctgagccagaagacgacggccccggcgcccgaggcggcgcccgagacgccggaggcgcctgcggcggggacgacgcccaaggcggcggcggcgccgaacgtgacggcggtgctggagaaggccgggcagtacaccaagttcatccggctgatggcgtcgacgcagcaggacacgcagctgaacgcgcaggccaacgactcggacacgggcttcacggtgttcgcccccaccgacagcgccttcaacagcctcaagccgggcaccctcaactcgctctcgcagcaggaccaggtgacgctggtgcaggcccacatcgtccccaccttctactccatggagtccttcgagaccgccagcaaccccgtccgcacccaggcctccggcaccgacgggccctgcaccgtcaacgtcaccgccaccagcaacagcgccgtcaacgtctccacggggatcgtccacaccaccgtcggcgccgcgctgcgcgccaccaggccgctcgccgtctactccgtcgacaaggtgctgctgcccatggacctcttcggccccaagccgcccgcctccgcgccgccggcccacggcaagaagccctcgtcggccaagggggcagccaaggcgccctcgggcgacgacgaggacgaggaggaggccccgcccgccggagccgccgccgccgtcggcgccggctggaggagcctggtcgccgtggtggccggccgccaccgccgcgtgcctcttggttagatgagaaaaaatggagctcggaggatcatggttgtccatgagaaccaccgtatcgatggagactacctgcgtgcgtgcatgtggtgcatgggattgggataggttactacttaannnntctgggggggggggggggctctctttttt

SEQ ID NO: 468 - protein, 268 aa, Triticum aestivum
MASSRRALILLAVVLAAVPAALSQKTTAPAPEAAPETPEAPAAGTTPKAAAAPNVTAVLEKAGQYTKFIRLMASTQQDTQLNAQANDSDTGFTVFAPTDSAFNSLKPGTLNSLSQQDQVTLVQAHIVPTFYSMESFETASNPVRTQASGTDGPCTVNVTATSNSAVNVSTGIVHTTVGAALRATRPLAVYSVDKVLLPMDLFGPKPPASAPPAHGKKPSSAKGAAKAPSGDDEDEEEAPPAGAAAAVGAGWRSLVAVVAGRHRRVPLG

SEQ ID NO: 469 - DNA, 1677 bp, Zea mays
ctctcattaattccagctccaacatctctctcctagctacatctctccactgtctgtttgcctgtcgaggccgggcgccagcagcaacaatggcgaggatgatcagccggccggccgtcctcctctcccccctggccatgatcgtcgtggccgccgccgtcatggcgctggcaccggcgccggtggccgcgaccaagtacaacatcaccaagattctggcgccctacaaggagtactccaagttcaacgacatgctgtccaagacgcgcctcgcgtacgacatcaaccggcgccagaccatcaccgtgctggccgtcgacaactccgccatgtcggcgctcgaccactactcgctgcagaccatccgccacatcctcgagctgcacgttctcgtcgactactacggcgacaagaagctcaagaagctcgcccatggctccaccgcttcctcctccatgttccaggctaccgggtcggcgtctggcatgtcggggtacgtgaacatcacccggaaggacggcaaggttagcttcatgacggaggacgccgacgacaccgcgaagccgtcccggtacgtcaagtccgtcaaggagttcccctacgacatcgccgtgctccaggtgagctccatcatctcgtccgccgaggccgaggcgccggtgccgcccccggcgcccgtggacctcgaggagctcctatccaagaggtactgcaagtccttcgcgtccctgctctccgccaacgccgaggtgttccgcgccgtgaacgagaccaaggacaacgggctgacgctcttctgccccgtcgactcggccgtcgcggccttcgcggccacgtacaagaacctcacggccaaggccaaggcggccatcctcctctaccacgccgtgccggactacttctcgctgcagctgctcaagtccaacaacggcatggtcaccacgctggccaccgccagcgacaagaagatggactacagctacgacgtcaagaacaaaggcgagacggtcacgctgcagaccagggtcgtcacgtccagcgtcaccgccaccgttggcgacatggagccgttggccgtgtatgccgtgaacaagttcctgcagcccaaggagctcttcaaggtcgtcgaggcgcccgcgcccgcgccggagccgtccaagaagaagaaggctggtcgcggcgggagtgacgacgattcctcggacgattcgggagattcgaccgccgatgctgagaagggcgacgcagcaccggctctgctcgtgcgatggctagtcaccgcggtcgcgacagcgggagttgcatatgccctgatgggataaacttctatcagtcacctgaattatattcggactttcatttgatttgagtattctttttctttcagtgttaaatttgttttcacttattataatggtgctctcgatcggttaaggtatataaactataagagtttattataagctttttatccaggccaatcatgcagaaacagatatatagttcaaacacattgcttccaacgcaaagacctgcttgtactttttgacctatgactcagagcgcgatgctccaaccgtgtccaaattatgaacctttattttgacgtcaagagcctgttctttttttaatgtaaatggcagaagaaaaatgagtaccgcagagacgatctttgtt

SEQ ID NO: 470 - protein, 410 aa, Zea mays
MARMISRPAVLLSPLAMIVVAAAVMALAPAPVAATKYNITKILAPYKEYSKFNDMLSKTRLAYDINRRQTITVLAVDNSAMSALDHYSLQTIRHILELHVLVDYYGDKKLKKLAHGSTASSSMFQATGSASGMSGYVNITRKDGKVSFMTEDADDTAKPSRYVKSVKEFPYDIAVLQVSSIISSAEAEAPVPPPAPVDLEELLSKRYCKSFASLLSANAEVFRAVNETKDNGLTLFCPVDSAVAAFAATYKNLTAKAKAAILLYHAVPDYFSLQLLKSNNGMVTTLATASDKKMDYSYDVKNKGETVTLQTRVVTSSVTATVGDMEPLAVYAVNKFLQPKELFKVVEAPAPAPEPSKKKKAGRGGSDDDSSDDSGDSTADAEKGDAAPALLVRWLVTAVATAGVAYALMG

SEQ ID NO: 471 - DNA, 1671 bp, Zea mays
gacgcacctaccgtccagcgtccgagacgagacctcaccacaccagcctcgcaatccaaaccatagtttaattagccaggctagcagtagcagctgtggtcgtcctcgcttgcttgcttgctaccagggtttgtgtgagtgtgttagtgagagagaaccatggcgacgcagcggttcacggcggcgctggtggcctgcctcctcctgctcctggcgctgccggcgcgcgggcgcaacatcacggccatcctcgccgggtacaaggagtacaagctatacaaccagtacctgtcggagacgaaggtgtgcgacgagatcaactcgcggcagtcgacgtcgatgtccgtcctggtgctgtccaacgacgccatgacgacgctggcctccgacgccggcgactcgctccccgccatcaagaacgcgctgcgcctccactcggtgctcgactactacgaccgcaagaaggtgaagaagtacggcgacgagagcgccgccacgctgtaccaggccacgggcgacgccgccagcaccacggggaacgtcaaggtggtggaccaggaggacaagaactacggcttctcggccgccacgccgggcgccaggatctgcaccgtcaccaaggaggtggagacgcaccctttcaagttcgccatcctcgaggtcacggcgcccatcgagttcgacggcctcttcgacaccccctccaccgacaacctcacccgcctcctggagcgcgccggctgcaaggtcttcgcgtcgctggccgcctccacgggcgtgctcaagacgtacgaggccgccatggacaagggcctcaccctgttcgccgtcaacgacgacgccttccaggccaaggacgcgcccgacgtcaaggccatgtccaaggccaacctcaccaagctcctccagtaccacgccctgccttcctacaacaccaagacctcgctcaagtccgtcaagggcccgctccgcacgctggccgccaaggccgacgtcacggtggtcgccaagggcgacgacgtctcgctcgacaccggcaagagcaggtcccgcgtcgcgtccaccgtcgtcgacagcgtcccgttctgcctgctcaccatggacaccctcctggtgccgccggagctctacgtcggcgccccggaggcggcaccggcgccggcgccagcggacgcgccacaggggtccccgcccgcggcggacgccccgtcggtggccgcggaccacgccgaccacaagtccaagaagccgtcggcgtcgtccgccgtcgcgtggcgaccggccggcgcgctcgccgcggtggccgtgtgctccgtcgtgctggcctccctcttgtgatgcattgttgcttgacagctcctccgacctctgcttcctccgatccaagcagatacccgtttctctgtgatctctctcccccgctctgttccggtccttgcttcattgaatctgttggtgcattgccatttccacatgtaatttgagcaaacatgtacatttcccccttttttcatgatagtttcagaacacaatattttaagcagctgcgccattccatttcgcgcaacggctttctctcggatcctgagacccattcatgtagtgaaaggagaagtcaaacgagaagaacaaatctgaaagctaaggtttttttttttaactggaccagaa

SEQ ID NO: 472 - protein, 392 aa, Zea mays
MATQRFTAALVACLLLLLALPARGRNITAILAGYKEYKLYNQYLSETKVCDEINSRQSTSMSVLVLSNDAMTTLASDAGDSLPAIKNALRLHSVLDYYDRKKVKKYGDESAATLYQATGDAASTTGNVKVVDQEDKNYGFSAATPGARICTVTKEVETHPFKFAILEVTAPIEFDGLFDTPSTDNLTRLLERAGCKVFASLAASTGVLKTYEAAMDKGLTLFAVNDDAFQAKDAPDVKAMSKANLTKLLQYHALPSYNTKTSLKSVKGPLRTLAAKADVTVVAKGDDVSLDTGKSRSRVASTVVDSVPFCLLTMDTLLVPPELYVGAPEAAPAPAPADAPQGSPPAADAPSVAADHADHKSKKPSASSAVAWRPAGALAAVAVCSVVLASLL

SEQ ID NO: 473 - DNA, 1178 bp, Zea mays
cccgggtcgacttcgctgtcgacgtttcgtctcactcctacgcgcacgcacagcaccgcgcccggcaggccgcactccgctccacgctctcgccccgcacaatgcgccgcctcagccgcgccgtggcgttcctgctgctgctccttcccctcgccctcgcggccacaaccacgatggcggcggccgtcgtggcgaaagctcccgctgcggcggcggcgcctccgaacgtgacggcggagatggccaagggcgggtgcaaggcgttcgcggacctgatcgcggcgtcccccgacgcgtcgtccacgtaccagtcggccgtggagggcggcatgacggcgttctgcccctccgacgacgccgtgagggccttcctgcccaagtacaggaacctcagcgcggacgggaaggcggagctgctgctgttccacgccgtgccggtgcactactcgctggggagcctcaagtccaacaacgggcccatgaacacgctggccaccgacggcgccgccaggagcttcaacttcacggtgcagagccagggcgacgccgtcacgatcaggacggccgccgccgccgcgcccgcgcgggtcgagtccacggtgctggacaaggaccccctcgccatctacgtcatcgacgccgtggtggagcccgtggagctcttcaagcccgcgccgtcgccgtcgccgacgcccgcgcccgcgcctgccgcggatgcgcccaaggctggcaacggcaaggccgccgcgcgccagcgccacccggcgcccgccgtggccgacgcgcccggccccgccgcggaagaggacgctgctcctgtggaccagaaggaagtcaagaagagcgcggccgatggcgcgccgtgctcccggtggtggcttgccgccgcgctggccgcggcctcggcattggtttagcgatccatggacggaagggctttgtttttttttgtcttttttttgtttttccggtgttgatccattggcgtgtgatcgtggttgtggtggcgtgcttcgaggtttgtgtttttttttttcggtcgagagaaaatagagtatgcgtgcttacgtatttgtgagtgagggtgaggctcagtgcgagtttatgaggaggggtttgtatttttggttttgacggccgagtgaaatttgggccctggctgaattgccccttgtggc

SEQ ID NO: 474 - protein, 271 aa, Zea mays
MRRLSRAVAFLLLLLPLALAATTTMAAAVVAKAPAAAAAPPNVTAEMAKGGCKAFADLIAASPDASSTYQSAVEGGMTAFCPSDDAVRAFLPKYRNLSADGKAELLLFHAVPVHYSLGSLKSNNGPMNTLATDGAARSFNFTVQSQGDAVTIRTAAAAAPARVESTVLDKDPLAIYVIDAVVEPVELFKPAPSPSPTPAPAPAADAPKAGNGKAAARQRHPAPAVADAPGPAAEEDAAPVDQKEVKKSAADGAPCSRWWLAAALAAASALV

SEQ ID NO: 475 - DNA, 1736 bp, Zea mays
cgcatctggagcttcaccacctcactcgctctcgctcccaccctcgagttctcgctcgctcgagctgtggcggcgagatgcggaaacagatccctcccgtctcctgcctcgtactcctcgcggcggctttcgcgctgctcgccaaggcgtctgcagcgtcaccggcgcaggccgccgtcgcggtcaacgtcacgggcgtcctctcggcgttcccggacctcagcgacttcacgcggctgctggcgtccagccccgtgctggcggagctcgcagggcggtcatcgctgacgctgctggccgtgccaaacggcaacctcccgcagtcgccgtcggcgttcgcggccgcgtcgggcgccgacctcgccgacgtcctccgctaccacgtcctcctcgagtacctctcccacgccgacctacgccgtctgcccgcctccgggaagctggtgaccacgctgttccagacgaccggccgcgccaccgcggacctaggcgccgtcaacgtcaccacagcgggcgcctcccgcctcaccgtcatccggtcgccggcaccgttcccgggctcgaacgccaccgtcctcggcgccatcaccgcggtgccgtacaacctgagcgtgctggcggtgagcggcctcatcgcgccctccgggttcgacctcgcggcgtccgagtcccagccgcccgcggccgtgaacatcacccgcgtcctcgccgacgcgcgcgccttcaacgtggcggcgtccatgctggaggcgtcgggcgtggcggccgagttcgaggacgacgagcgcggggccgggatcacggtgttcgcgccgaccgacgacgccttcgcgggcctcccggcgggggaccggctccagtcgctccccgccgaccgcaaggccgtggtgctccgcttccacgtgctccactcctactacccgctggggtcgctggagtcgatcgtgaaccccgtccagcccacgctggccaccgagttcagcaacgccggccgcttcaccctcaacatcacccgcgccaacggctccgtggccatcgacaccggcgtcgtgcaggccaccatcacgcggaccgtgttcgaccagaaccctgtcgccgtcttcgccgtatccaaggttctcctccccaaggagatgttcacccgcacagccgccgcctccatcgtggccaccaccgcctccgcgtcctcccccccaccagccgcgacagccccggaggcctccgagagcgcgcggacgccgccgacaaagctgtcctccccacccgcgctccgcggcggcgggcaggactacgccacggcgccggcgccggcgcgagggatcgagtggtggtgtatagcattggtgtatctactcccacatctggtatgagatccgggactccgtcagtccaccgctgttctcaatttttgccttctgttttctcttctctcttctttttcttatgtgggttttgcaagaatctgtacaatgttgactctgtgaggtgaggtgaggcctgagggaggtgaagaaggagaagaagaagattcagctgcgaaaacaaagaaaatgcagcgaccttttaagcaagaagaaacagaattggttattgttggccatcatcaaaggggaaataacagtaccgccctgtaaaaatccaatcaaatccattgcatccgacaattgctttaccatactcgtgtctcgtgtgtgctacattgcagttgcttcagccagctccatttttgccctgtc

SEQ ID NO: 476 - protein, 430 aa, Zea mays
MRKQIPPVSCLVLLAAAFALLAKASAASPAQAAVAVNVTGVLSAFPDLSDFTRLLASSPVLAELAGRSSLTLLAVPNGNLPQSPSAFAAASGADLADVLRYHVLLEYLSHADLRRLPASGKLVTTLFQTTGRATADLGAVNVTTAGASRLTVIRSPAPFPGSNATVLGAITAVPYNLSVLAVSGLIAPSGFDLAASESQPPAAVNITRVLADARAFNVAASMLEASGVAAEFEDDERGAGITVFAPTDDAFAGLPAGDRLQSLPADRKAVVLRFHVLHSYYPLGSLESIVNPVQPTLATEFSNAGRFTLNITRANGSVAIDTGVVQATITRTVFDQNPVAVFAVSKVLLPKEMFTRTAAASIVATTASASSPPPAATAPEASESARTPPTKLSSPPALRGGGQDYATAPAPARGIEWWCIALVYLLPHLV

SEQ ID NO: 477 - DNA, 1242 bp, Zea mays
tctaaactagggtgaatcaagcagcagccaatggcttctcgttcgcccaccattgccctggtcctcatccttgcctgcttctcctcgccggcggcggccttcaacatcaccaggctactcggacaattctccgacttcacaacctttaacaacctcctgtctcagacgaagctcgcggaggatatcaaccgccggcagaccatcaccgtgctcgccgtggacaacggcgccgccggtggcatctcctccctcccatcagacgtccagcggaaggtgctctccatgcacgttgtcctcgactactacgacaccgccaagctggaggccatcaagaaccactccgccctgctgacgactatgttccagtcctccggccaggccaccgaccgcatgggcttcctcaacttcaccaagcgctccgacggtgtcatggtgttcggctccgctcagcccggagcgcagatgacctcccatatggtcaagtccgtcacttcccgcccgtacaacatctcagtgctgcaggtcagcgcccccatcgtgccgcccggtgtcggcggctcggcagacagcggcaagggtggcgcgccgccgccgcataaggccacggcgcccgcacccgggcccgcaacaaagggaaagaagggagctcctccgtccaaagatgaggaggcccctgctccggcaccgtccgacgacgccagcgcagacgcgcctgccgatgcccctgggccggcggcggacggcccaacggctgatggccccgcggcagatgcccctacggcggacggtccggcagctgacgcgccggcgcataagaagagtagcgacgaggcggctgacgcgccagaaggtttagccgccggcaggataaaggccgctgcgcgtctgggaatcgtggcgcttctgatgacgattatttgacattgactgctattgctggaaattagaatggagctttcgtgatttgggattgacagtaagctgaactctatacagtacgatgcaagggcttgtccactgactcaaacagacttcatttttttttgcgcgtttaatggattggacatctcgtgctactggaggctggaacacgtagtttcttttttctttctaatttcatgttcatgtgatggagcttactgatgtcttgtgcatatataaacattgtgtgtacgaagatgttgttaatctgttcaagctggaaaaaaactatagaagaattacttcgatcttgttactatc

SEQ ID NO: 478 - protein, 296 aa, Zea mays
MASRSPTIALVLILACFSSPAAAFNITRLLGQFSDFTTFNNLLSQTKLAEDINRRQTITVLAVDNGAAGGISSLPSDVQRKVLSMHVVLDYYDTAKLEAIKNHSALLTTMFQSSGQATDRMGFLNFTKRSDGVMVFGSAQPGAQMTSHMVKSVTSRPYNISVLQVSAPIVPPGVGGSADSGKGGAPPPHKATAPAPGPATKGKKGAPPSKDEEAPAPAPSDDASADAPADAPGPAADGPTADGPAADAPTADGPAADAPAHKKSSDEAADAPEGLAAGRIKAAARLGIVALLMTII

SEQ ID NO: 479 - DNA, 1704 bp, Zea mays
tcaagcaacgaaaccgtaaacctccgaagaggaaaggtgagggcgagaaaagaccaaaatattcccctctcatcaggcaaccgcaacccccgtccctcttccgtccgtcgtcatctacctcactacctgctcctcactccccgctccactggcgagatggggagaggcttgggcgccgctcccgtctcgccgcgcctcgctagtctcggggcagctgcgctggcgctgctcgtggcggcggcgctgccttccccagcagctggggctgggctcaacgcgacggcggtgctctcggcgttccccaacttcgccgacttcgcgcggctgctggcatccactcccgtggccagcgagctggccgggaggtcgtccctgacgctcctggccgtgccgaacgccaacctgccgcagtcaccctcggctttcgtagccggcgccgacatcgccgacgtgctgaggtaccacgtcctgctggagtacctctccccgtccgacctcgcccgcctccctccctccgggaagctcgtgacgacgctgttccagaccacgggccgcgcgccctccgacttcggcgccgtcaacctcaccgtggggcccaactccaccgtcgtggtccgctcgccggcgccgtccccgggatcgagcgccacggtcctcggcgccgtgaccgcggtcccgtacaatctcagcgtgctcgcggtgggtggccttatcgtaccctccggattcgacctcgcggcctccgagagccgcccgccaccgccggtgaacatcacccgggttctcaccgacgcgcgtgggttctacgtggcggcctccatgctgcaggcttccggtgtagcgagcgagtttgaggccgacgagcgcggtgctggcatcaccgtcttcgtccccaccgacgacgcctttgccggcctccccgccaccgaccgcctccagtcactacccgctgagcgcaaggccgtcgtgctccgcttccatgtgctgcactcttactacccgctgggctccctcgagtccatcgtgaaccctgtccaacccactctcgccacagagcacaccgaggctggccacttcaccctaaacataacccgcgtcaatggctccattgccattgacacgggcatcgtgcaggcatccatcacccgcacagtgttcgaccagaatcctgtggcggtctttgccgtctccaaggttctactgcccaaggaaatgttcagccggggcgattctggcagcaccgccatggtaccaccttcggttgcgatggcgcccggcgacgccgggaccgagcagacaccacagacgaggctctcatccccgcctgatctccacggggaagatagcgagtcgtcagctgctttggcgacagcaaaggggacttcttggtggtgtgtaggactcatgtatctgcatctattactatctctggtatgagattctggtcgtgcttgttgctttcttgcttccttgtgctcagtttttgtattacttactgtctagaacgtctacaccgggagggagggattggggagagaatttcgtagatttaaagtagcaaaaaaaattagttgcttcacctgattattctaatttctttccattttgtcatgtggcaaagggaaataatgtcatgtgtacaaatctatgcagtccttttgctctacaatgaatagtattttctgttttggccaaaaaaaaaaa

SEQ ID NO: 480 - protein, 426 aa, Zea mays
MGRGLGAAPVSPRLASLGAAALALLVAAALPSPAAGAGLNATAVLSAFPNFADFARLLASTPVASELAGRSSLTLLAVPNANLPQSPSAFVAGADIADVLRYHVLLEYLSPSDLARLPPSGKLVTTLFQTTGRAPSDFGAVNLTVGPNSTVVVRSPAPSPGSSATVLGAVTAVPYNLSVLAVGGLIVPSGFDLAASESRPPPPVNITRVLTDARGFYVAASMLQASGVASEFEADERGAGITVFVPTDDAFAGLPATDRLQSLPAERKAVVLRFHVLHSYYPLGSLESIVNPVQPTLATEHTEAGHFTLNITRVNGSIAIDTGIVQASITRTVFDQNPVAVFAVSKVLLPKEMFSRGDSGSTAMVPPSVAMAPGDAGTEQTPQTRLSSPPDLHGEDSESSAALATAKGTSWWCVGLMYLHLLLSLV

SEQ ID NO: 481 - DNA, 1295 bp, Zea mays
tcatccgtacccgagcactgcacagcacagcacagcacagcacaccacctttagtatatagcaatagcacactcggcccccctcctcttcaactcccccggccgtcctgctcgccggcttctggctggcccctgcatccgcccagtgtgtgtgacctcagggaatcgattcgttcatccaagtgaaggcaaccagactccaggatggagttcaaagccggcgttttcaccgtggcaatgctagccatcgtcgtgctctccacaccagcagccccgcagaagcccaagagccctcccgctccgcgatccccagtcgtcctggcgccggcgccagcgcccgcaccggcggcgccgcaccacgtggacctcgcggacctcctcagcgtggccgggccgttccacacgttcctggactacctgcagaagaccggcgtcatcgagaccttccagagccaggcgaacgacacgaagcggggcggcatcaccgtcttcgtgcccaaggactcggcgttcgcggcgctgaagcagaccacgttcgccaacctcacccaggaccagctcaggtcgctgctgctgtgccacgcgctgcccaagtactactcgctggccgagttcgaccggctgagcgcgctcggcccggtggccaccctcgccggctcgcagtacacgctgaacctcacctacgacatgggcaccgtccgcgtgaagtccatgtggtccgaccccaagatcagcagcagcgtgtactccacccgccccgtcgcggtgtacgaggtcggcaaggttctcctgccgatgcagatcttcaagagcgaccccccgctggcgcctgcccccgctccggcaccggatgccaaggcatccgacgtcgctcccagcccggcgtcggggaaatcatcagcgagtgcgaaggcgaaggagaaggcgggagagaagagctcgtcgtgccgagccggtgtcgtcgcccattacttggcgatcgctgtctccggcggcctggtgctcttgtggtgaggatcgacgagttcgtcctcaccgtgtgtccgtgtcgaaggagcaagtacggggttcagcttagggccccccgtgtttaatttatatatgggtgtttatggattcattcttttggacatatggtaggccatttgtgtttaggactgagctgttgttgagtgtttgcgtcatatgcttctactaggtgtatgcccgtgcgttgctacgggaccaacatgtattgctaagatacattaagataagaaaacactataataaaatatattgatataaaaaaaaaaa

SEQ ID NO: 482 - protein, 269 aa, Zea mays
MEFKAGVFTVAMLAIVVLSTPAAPQKPKSPPAPRSPVVLAPAPAPAPAAPHHVDLADLLSVAGPFHTFLDYLQKTGVIETFQSQANDTKRGGITVFVPKDSAFAALKQTTFANLTQDQLRSLLLCHALPKYYSLAEFDRLSALGPVATLAGSQYTLNLTYDMGTVRVKSMWSDPKISSSVYSTRPVAVYEVGKVLLPMQIFKSDPPLAPAPAPAPDAKASDVAPSPASGKSSASAKAKEKAGEKSSSCRAGVVAHYLAIAVSGGLVLLW

SEQ ID NO: 483 - DNA, 1360 bp, Zea mays
acgccaccgacatggggggggcagcaaaccaaccaaaatggtcctgcaaatgttttatgcattttcaccccaggattcatgcccagttgcacttgcacactgcagctagctagctagctgctgctcgtcaaccatggatatggaacctctgctctctacacacccattgcagctaaaaaaatgaactgctcgctctctctgagtcagcataaccaaacctggccacgcccttacgaatcaacaagatttgagttttgatgtacaccaccaggtcacatatcgaccttgttcatacttcatactaacaacggcagtaatcgatgaagtaataagcaaccgagcatgaccaaaaaccaaaaaggcatggcgtctccatccaaagacaacagctgggtggccgagcaatctttaaaccaccccgccctaagcagccaaggcggcggccacggcgatagcggcggcggcggtcgcgagccaccgcgtgcggcacggggccgccgcgttcttcttgtagtccttcctctggtcggccggcgaggcgtcggcggcggccgggccaggcgcgtccgctccgcgccgccgctggtgccgcgtccgcttggcggacctaggcgccagcgccggcgccggcgcgggcgcaggggtcggcgcgtccgccacggggtcgaacagctccacgggctccagcaccgcgtccacggcgtagatggcgacggggtccctgtcgtagacggtggagcgcacgcgggccggcgcgtcggccgccggcgtccgcagcgtcacctggtcgcccgcgttctgcaccgtcaggttgtagttgctggcggcgccgtcggtggccagcgtgttcatgggcccgttgctggatttcaggccccgcagcgtgtagtacacgggcaccgcgtggaacagcagcagcgacgccttgccgtccgcgctcaggttccggtagctgggcatgaacccgcgcacggcctcgtccgtcgggcagaacgccgtcacgccgccgctcaccgccgactcgaacgccgacagagcgtcgggggacttgtccagcagcgacgcgaacgccttgcacccgcccttggacatgagcgccgtgatgttgggcgtcgccttcgccgcggtgccgccgccggcggcggcggccgaggctagcggcaggaggaagaggagcgctagcgcccccgcggtggtggtggcggcgccgagtggggagtggcacattgcggcgcgtgggagtgagcggcaggcagatggcagcggccgacactccagcagccgagagtgaaatgtcagtgtgaggactgaggtgatgggctggctttgtgattttacagaaagaaataccttcacacat

SEQ ID NO: 484 - protein, 267 aa, Zea mays
MCHSPLGAATTTAGALALLFLLPLASAAAAGGGTAAKATPNITALMSKGGCKAFASLLDKSPDALSAFESAVSGGVTAFCPTDEAVRGFMPSYRNLSADGKASLLLFHAVPVYYTLRGLKSSNGPMNTLATDGAASNYNLTVQNAGDQVTLRTPAADAPARVRSTVYDRDPVAIYAVDAVLEPVELFDPVADAPTPAPAPAPALAPRSAKRTRHQRRRGADAPGPAAADASPADQRKDYKKNAAAPCRTRWLATAAAAIAVAAALAA

SEQ ID NO: 485 - DNA, 1356 bp, Zea mays
cttcgctgagagcgcgcgggcacctaccgcttccccattttcgccgagggagcccgcagcagcagctgccacccatacgaacatctcagcattttttttgtttaatttttaatgtttcttctcccgcccgacacgaaagaacgccgcggttttatatactacgccccctcttcatagcgctccttcgagttcgagctgccaccgtctctccttcctccgtcccctcttccctgctctgctccatcagggcaggggcttgcatcagagaaggtagtagagaggatcaggtgcgcgagacagacgctgcaatgatggagtccaaggcagcaattattcttgccgcggctgtactggccgtcctcttcgccccggcattgggtcagaagagcagcccgccggcgccggcgcccatgtcgctgccgccgaccccggcaccggcgccggcgccgcactacgtggacctcgcggagctcctgagcgtggcgggcccgttccacacgttcctcaactacctggagaagagcaacgtgatcgagaccttccaggggcaggccaacaacaccaaggtgggcatcaccgtgttcgtgcccaaggactcggcgttctcggcgctgaagcagtccaccttctccaacctcaccgccgaccagctgaagacgctgctgctgtaccacgcgttgcccaagttctactccctggccgagttcaagaacctgagctcgctcaacccggtgaacaccttcgccgggtcgccctacacgctcaacctcaccgacgacatgggcagcatctacgtgcagtccatgtggtccaggcccaagatcgccagcagcgtgtacgccaccaggcccgtcgccgtctacgcgctcaacaaggtgctcctgcccatgcagctcttcagcaaggacccgccgctggcgccggtgcccgcgcccgccccggagcccggcgcgtccgacgcccccggcccggcggccggcaaggccggcgggctgacgggcggcaagggtgactccaccagcgccgcgcgcgacacgggcgccgtcggcgttgccagttccttgctgctcgccgccgcagcaggctgcttgattctccagtggtgaggagacttgtggttgtgggtccgttcttgccatgtgtggtgttcgtgcttcccctgccccccacacttgatttcgtcttgaatgggttgctggagtcattcttttggacataatgtaggcataccgttaggatcgagctggagtactttttttacgtcacgttacattactgtcataatttccatcattttttgatggacggatgattgaacgaatgaatacgagaagaagttttcactgctaaaaaaaa

SEQ ID NO: 486 - protein, 265 aa, Zea mays
MMESKAAIILAAAVLAVLFAPALGQKSSPPAPAPMSLPPTPAPAPAPHYVDLAELLSVAGPFHTFLNYLEKSNVIETFQGQANNTKVGITVFVPKDSAFSALKQSTFSNLTADQLKTLLLYHALPKFYSLAEFKNLSSLNPVNTFAGSPYTLNLTDDMGSIYVQSMWSRPKIASSVYATRPVAVYALNKVLLPMQLFSKDPPLAPVPAPAPEPGASDAPGPAAGKAGGLTGGKGDSTSAARDTGAVGVASSLLLAAAAGCLILQW

SEQ ID NO: 487 - protein, 115 aa, Artificial sequence
  FLA-like domain - N-terminus
TITVCAVDNAGMSDLLSKQLSIYTIKNVLSFRVLLDYFDAKKLHQITNGTALAATMFQATGSATGSSGFVNITDLRGGKVGLSPADYNGPPPAKFVKSIAEIPYNISVIQISTIL

SEQ ID NO: 488 - protein, 107 aa, Artificial sequence
  FLA-like domain - C-terminus
VDGGVTIFCPRDDAMKKFLPKFKNLTAEGKQSLLEYHGIPIYQSISNLKSNNGDMNTLATDGAKKYAVVIQNDGEDVTIKTKIVTAKITATVVDKLPLAIYSLDKVL

SEQ ID NO: 489 - protein, 9 aa, Artificial sequence
  H1 consensus
  VARIANT (1)..(1): / replace = "Thr"
  VARIANT (2)..(2): / replace = "Leu" / replace = "Ile"
  misc_feature (6)..(6): Xaa can be any naturally occurring amino acid
  VARIANT (7)..(7): / replace = "Glu" / replace = "Asn"
  misc_feature (8)..(8): Xaa can be any naturally occurring amino acid
SVFAPXDXA

SEQ ID NO: 490 - protein, 10 aa, Artificial sequence
  H2 consensus
  VARIANT (1)..(1): / replace = "Leu" / replace = "Ile"
  VARIANT (2)..(2): / replace = "Tyr" / replace = "His" / replace = "Gln"
  misc_feature (3)..(3): Xaa can be any naturally occurring amino acid
  VARIANT (4)..(4): / replace = "Leu" / replace = "Ile"
  misc_feature (5)..(6): Xaa can be any naturally occurring amino acid
  VARIANT (7)..(7): / replace = "Leu" / replace = "Ile"
  VARIANT (8)..(8): / replace = "Leu" / replace = "Ile"
  VARIANT (9)..(9): / replace = "Leu" / replace = "Ile"
VFXVXXVVVP

SEQ ID NO: 491 - protein, 11 aa, Artificial sequence
  H1 in N-terminus Fla domain in SEQ ID NO: 2
ITVCAVDNAGM

SEQ ID NO: 492 - protein, 12 aa, Artificial sequence
  H1 in C-terminus Fla domain in SEQ ID NO: 2
GVTIFCPRDDAM

SEQ ID NO: 493 - protein, 10 aa, Artificial sequence
  H2 in N-terminus Fla domain in SEQ ID NO: 2
ISVIQISTIL

SEQ ID NO: 494 - protein, 8 aa, Artificial sequence
  H2 in C-terminus Fla domain in SEQ ID NO: 2
LAIYSLDK

SEQ ID NO: 495 - protein, 4 aa, Artificial sequence
  Glycosylation motif 1
  VARIANT (4)..(4): / replace = "Glu"
SPAD

SEQ ID NO: 496 - protein, 6 aa, Artificial sequence
  Glycosylation motif 2
SPPAPA

SEQ ID NO: 497 - protein, 5 aa, Artificial sequence
  Glycosylation motif 3
PAPAP

SEQ ID NO: 498 - DNA, 52 bp, Artificial sequence
  fwd primer
ggggacaagtttgtacaaaaaagcaggcttaaacaatgcagcttccgtcgtc

SEQ ID NO: 499 - DNA, 51 bp, Artificial sequence
  rev primer
ggggaccactttgtacaagaaagctgggtttctttttcaaacttccatcaa

SEQ ID NO: 500 - DNA, 2194 bp, Oryza sativa; identical to SEQ ID NO: 23

SEQ ID NO: 501 - DNA, 700 bp, Arabidopsis thaliana
atcactctttttctttagctctgcaagttctcatacttttttaagtataaagcaaaagactttcagtttcaataatctttctataaaaagatcaacatccatggctatcagaatttctcgagtgctgcaatcatcaaagcaacttctaaaatcgttgtcacactcatcaaacaatgtcgctattcctaaaggacaccttgcggtttacgtaggagagatgatgcagaagaggagattcgtggttccagtgacatacttaagtcacccttgttttcaaaagcttctaagaaaagcagaagaagagtttgggtttgatcacccaatgggtggcctcactattccctgcactgaacaaatcttcatcgatctcgcctctcgccttagcacttcatcgtgattcacactgaccagtagatcaaactctttttctagccgtttcttcaagagatgatctctcccttgaaagtgaaacagagctgtcttttaactgatgtaagattgttttgtttttcctcacgtttcagtgagttgtgattaatattaatcaaaatccatgattccttctattgatgatacttgagtcatcatttgttacttccttctgaaacttggaaagaaccatcgaacaccaaagtactggaagatataactgttgatcttctctgtttcaagatggaagataaaaatatcattttcgttc

SEQ ID NO: 502 - protein, 98 aa, Arabidopsis thaliana
MAIRISRVLQSSKQLLKSLSHSSNNVAIPKGHLAVYVGEMMQKRRFVVPVTYLSHPCFQKLLRKAEEEFGFDHPMGGLTIPCTEQIFIDLASRLSTSS

SEQ ID NO: 503 - DNA, 465 bp, Arabidopsis thaliana
atggctggaggtctcgggaaatgcagcaagatccgtcacattgtgaggctaaggcaaatgcttcgacggtggcgcgatcaagcgaggatgtcttcttctttcagccgttgtgtaccgtcggatgtaccgtcaggacacgtggcggtctacgtaggaagcagttgtaggagatttgtggtgcgcgcgacgtatctgaaccatcctgtcctaaggaaccttcttgttcaagctgaggaagagtttggtttcgttaaccaaggtccgttggttatcccttgtgaagaatcggttttcgaggaatcgattcggtttatatcccggtctgattcgacccggtcaagacggtttacttgtcccgatgattttcagaagaattgccacgtggtgggaatcagaagcaagcttgatctatggatcgaatctcgaccgttacttcacggcgttactgaaaaagccgtttggtga

SEQ ID NO: 504 - protein, 154 aa, Arabidopsis thaliana
MAGGLGKCSKIRHIVRLRQMLRRWRDQARMSSSFSRCVPSDVPSGHVAVYVGSSCRRFVVRATYLNHPVLRNLLVQAEEEFGFVNQGPLVIPCEESVFEESIRFISRSDSTRSRRFTCPDDFQKNCHVVGIRSKLDLWIESRPLLHGVTEKAVW

SEQ ID NO: 505 - DNA, 327 bp, Arabidopsis thaliana
atggcgatgaaaaaagcaaacaagctaacgcaaacggcgatgatcaagcaaatcttgaagaggtgctcgagcttgggaaagaaacagagtaatgtgtacggtgaagacgaaaacggatctcctcttaacgtaccaaaaggtcacttcgtcgtctacgtcggagagaatcgggttaggtacgttgtgcccatttcgtttttgacccgacctgagtttcagcttcttctccaacaagccgaggaagagtttggctttgatcatgacatgggtctcactatcccttgtgaagaagtcgttttccgatctctcacctccatgctccgatga

SEQ ID NO: 506 - protein, 108 aa, Arabidopsis thaliana
MAMKKANKLTQTAMIKQILKRCSSLGKKQSNVYGEDENGSPLNVPKGHFVVYVGENRVRYVVPISFLTRPEFQLLLQQAEEEFGFDHDMGLTIPCEEVVFRSLTSMLR

SEQ ID NO: 507 - DNA, 426 bp, Arabidopsis thaliana
atgatgataaacgcaaagaagctcatgaagttggccaagaaatggcaacaaagagcagccctcaagagaaaaagaatttcatttcagagatcaagtattactactagcagccaaacagctgtagaaaagggttgtttcgtggtttacacggctgataagatccgtttttcatttcccttaagttacctaagcaacactattgtccaagagctcttgaaaatatctgaagaagagttcggtctcccgacggaaggaccaatcacattgccattcgattcggcctttttagagtatctcatcaatctgatccaaagacgaatggatgaagatacagaaaaggctctgttattgtcaatctcaagtgctagaagctcttttcaaccacaacaacattgtagtgctactcaacagttgcttgtgttttag

SEQ ID NO: 508 - protein, 141 aa, Arabidopsis thaliana
MMINAKKLMKLAKKWQQRAALKRKRISFQRSSITTSSQTAVEKGCFVVYTADKIRFSFPLSYLSNTIVQELLKISEEEFGLPTEGPITLPFDSAFLEYLINLIQRRMDEDTEKALLLSISSARSSFQPQQHCSATQQLLVF

SEQ ID NO: 509 - DNA, 426 bp, Arabidopsis thaliana
atgataaacgcaaagaagcttatgaagatggctaagaaatggcaacaaagagcagccctccacaggaaaagaatctcatttcagagatcaagtgtctttactagcagctcttctactgtagaaaagggttgtttcgtggtttacacggcggataaaatccgctttgcttttccaataagttatctgagcaactctgttgtccaggagctattgaaaatatctgaagaagatttcggtctcccaacggaaggaccaatcacattaccattcgattcggcctttttagagtatctcgtcaaactgatccaaagacgaatggatgaagatacagaaaaggctttgttattgtcaatctcaagtgctagatgctcttttcaaccacaagaacaacaatgtagtactacgcaacagttgcttgtattttag

SEQ ID NO: 510 - protein, 141 aa, Arabidopsis thaliana
MINAKKLMKMAKKWQQRAALHRKRISFQRSSVFTSSSSTVEKGCFVVYTADKIRFAFPISYLSNSVVQELLKISEEDFGLPTEGPITLPFDSAFLEYLVKLIQRRMDEDTEKALLLSISSARCSFQPQEQQCSTTQQLLVF

SEQ ID NO: 511 - DNA, 426 bp, Arabidopsis thaliana
atgatgaacacaaaaaagctaatcaagatggccaagaagtggcaacaaagagcagccctccacaggaaaaggatctcatttcaaagatcaagtagtgctactagctcaaccgctgcagagaagggttgttttgtggtttacacgacagacagcacacgctttgcttttccgctaagttacctgagtaactctgttttccaagaactcttgaagatctctgaagaagagtttggcctcccaactggtggacctatcacatcgccattcgattcagttttcttggagtatctcatcaaattggtccaaagacgaatggatgcagacacagaaaaggctttgttaatgtcaatctctagtgctagatgttcttcccaatgctctttgaaactacaagaacgtagtactcaacaattgcttgtattttag

SEQ ID NO: 512 - protein, 141 aa, Arabidopsis thaliana
MMNTKKLIKMAKKWQQRAALHRKRISFQRSSSATSSTAAEKGCFVVYTTDSTRFAFPLSYLSNSVFQELLKISEEEFGLPTGGPITSPFDSVFLEYLIKLVQRRMDADTEKALLMSISSARCSSQCSLKLQERSTQQLLVF

SEQ ID NO: 513 - DNA, 447 bp, Arabidopsis thaliana
atgatcaacactaagaaactactcaagatggccaagaaatggcaacaaagagctgccctcaagaggaaaagaatctcattccaaagatcaactactactactactactactactactactactagcagctcaactgctgtggagaagggctgtttcgtggtttacacggttgataaaatccgctttgcttttccgttaagttacttgaacaactctgttttcgaagagctcttgaagatatctgaagaagagttcggcctcagggcgggtggaccaatcacgttgccgttcgactcggttttcttggagtatctcatcaaatttatcgaacgaagaatggatggagatacagaaaaagctcttttaatgtcaatctctagtgctagatgctctatgcaaccacaagaacaacagagtggttatacccaacaattacttgtattttag

SEQ ID NO: 514 - protein, 148 aa, Arabidopsis thaliana
MINTKKLLKMAKKWQQRAALKRKRISFQRSTTTTTTTTTTTSSSTAVEKGCFVVYTVDKIRFAFPLSYLNNSVFEELLKISEEEFGLRAGGPITLPFDSVFLEYLIKFIERRMDGDTEKALLMSISSARCSMQPQEQQSGYTQQLLVF

SEQ ID NO: 515 - DNA, 309 bp, Arabidopsis thaliana
atgatgaacacaaagaaactcatgaagatggccaagaaatggcaacagagagcagccttaaggaggaaaagaatctcattccagagatcaaattctactactagtagctcatccgcggtagagaagggctgttttgtggtttacactgcggatcaagtacgctttgcttttccgataagttacctgagtaactctgttattcaagagctcttgaagatatctgaagaagagtttggtattcccacagaaggaccaatcacgttgccattcgattcgattcgattttcttggagtatctcatcaaattga

SEQ ID NO: 516 - protein, 102 aa, Arabidopsis thaliana
MMNTKKLMKMAKKWQQRAALRRKRISFQRSNSTTSSSSAVEKGCFVVYTADQVRFAFPISYLSNSVIQELLKISEEEFGIPTEGPITLPFDSIRFSWSISSN

SEQ ID NO: 517 - DNA, 408 bp, Arabidopsis thaliana
atgatgaacacaaagaagctaatcaagatgttcaggaaatggcaacagagagcagctctccacaggaaaagaatctcattccaaagaccaagtacccgctcaaccactgtagagaagggatgctttgtcgtttacacggcggacaacacacgctttgcttttccgataagctacctaagcaactctgtatttcaagagattttggagatatctgaagaagagtttggcctcccaaccggtggaccaatcacattaccattcgattcggtttttttggagtatctcatcaaattgatcaaaagacgaatggatggagatacagaaaaggctttgttaatgtcaatctctagtgctagatgttctttgcaaaaacaagaacagagtactcaacaattgcttgtattttag

SEQ ID NO: 518 - protein, 135 aa, Arabidopsis thaliana
MMNTKKLIKMFRKWQQRAALHRKRISFQRPSTRSTTVEKGCFVVYTADNTRFAFPISYLSNSVFQEILEISEEEFGLPTGGPITLPFDSVFLEYLIKLIKRRMDGDTEKALLMSISSARCSLQKQEQSTQQLLVF

SEQ ID NO: 519 - DNA, 432 bp, Arabidopsis thaliana
atgatgataaacgcaaagaagcttatgaagatggctaagaaatggcaacaaagagcagccctccacaggaaaagaatctcatttcagagatcaaatgtctttactagcagctcttctactgtagaaaagggttgtttcgtggtctacacggcggataaaatccgctttgcttttccaataagttatctgagcaactctattgtccaagagctcttgaaaatatctgaagaagagttcggtctcccaacggaaggaccaatcacattgccgttcgattcggttttcttggagtatctcatcaaactgatccaaagacgaatggatggagatacagaaaaggctctgttgatgtcaatctctagtgctaagtgttctttacaatgttctttgctacagcaagaacagagtactcaacaattgcttgtattatag

SEQ ID NO: 520 - protein, 143 aa, Arabidopsis thaliana
MMINAKKLMKMAKKWQQRAALHRKRISFQRSNVFTSSSSTVEKGCFVVYTADKIRFAFPISYLSNSIVQELLKISEEEFGLPTEGPITLPFDSVFLEYLIKLIQRRMDGDTEKALLMSISSAKCSLQCSLLQQEQSTQQLLVL

SEQ ID NO: 521 - DNA, 426 bp, Arabidopsis thaliana
atgatgaacacaaagaagctcttgaagatggccaagaaatggcaacagagagctgccttaagaaggaaaagaatctcttttcatagatcaactgatactactagcagctcaaccgctgcagagaagggctgttttgtggtttacacatccgatagaatccgctttgcttttccaataagttatctgagcaactctgttatccaagagctcttgaagatatccgaagaagagtttggcatccccacggaaggaccaatcacattgccattcgattcggttttcttggagtatctcatcagattggtccaaagacgaatggatggagacacagaaaaggctcttataacgtcaatctctagtactagatgttctttaccatgctcttttcaacttcaagaacatagtagtactcggcttgtattttag

SEQ ID NO: 522 - protein, 141 aa, Arabidopsis thaliana
MMNTKKLLKMAKKWQQRAALRRKRISFHRSTDTTSSSTAAEKGCFVVYTSDRIRFAFPISYLSNSVIQELLKISEEEFGIPTEGPITLPFDSVFLEYLIRLVQRRMDGDTEKALITSISSTRCSLPCSFQLQEHSSTRLVF

SEQ ID NO: 523 - DNA, 315 bp, Arabidopsis thaliana
atggtgaagaagctactatgttgtggagccaagagcttctcccaaagagctagattaccggacgaaggacgagtccgagtttatgtcggaaacgatagagatacacaatgcaagttagagatggatgctgatttcttgacacatcctttgttcgaggatctcctccggttatccgaagaagagtttggtcactcatacgacggtgctttaaggatcgcctgcgagatacaagtttttctaaacttgatccattaccttaagtccacgagtcatgctcctcattattatattgatgcatctcattatctttattga

SEQ ID NO: 524 - protein, 104 aa, Arabidopsis thaliana
MVKKLLCCGAKSFSQRARLPDEGRVRVYVGNDRDTQCKLEMDADFLTHPLFEDLLRLSEEEFGHSYDGALRIACEIQVFLNLIHYLKSTSHAPHYYIDASHYLY

SEQ ID NO: 525 - DNA, 444 bp, Arabidopsis thaliana
atgaagcatctcatccgccgcctctctagagtcgccgactcatcctccgaattctccatccgccgttccacctcctccttccgcaaccgtcgcggtcaccatcgtctccacgcgccgccgcctccgtggtcaatatgtccagctagaagagtcaacaccgtccccgctggtcacgtacctgtctacgtcggcgaggagatggagaggttcgtggttagcgcagagcttatgaaccacccgatcttcgttggtttgctaaaccgatccgctcaagaatacggttacgctcagaaaggagttcttcatatcccttgccacgtcatcgtgtttgagcgcgtggtggaaacgctccggttgggagggtttgaagggtccggtgatctagagaatcttgtggcttcgttgctctccggtgatgagttgatacctgaaactacagagtag

SEQ ID NO: 526 - protein, 147 aa, Arabidopsis thaliana
MKHLIRRLSRVADSSSEFSIRRSTSSFRNRRGHHRLHAPPPPWSICPARRVNTVPAGHVPVYVGEEMERFVVSAELMNHPIFVGLLNRSAQEYGYAQKGVLHIPCHVIVFERVVETLRLGGFEGSGDLENLVASLLSGDELIPETTE

SEQ ID NO: 527 - DNA, 441 bp, Arabidopsis thaliana
atgtctctgaagaaaagatcttgctcgaggcttagactcaccgatttgatggagaagtggaggaagtgtaagaaaggacacttcgctgtgtataccagagaaggcaggaggtttgttttacccttggattatctcaaacatccaatctttcaggtcttattggagatggcagaggaagagtttggctccactatttgtggccctttacaggttccttgcgacggaggtttgatggatcacatcctcatgttgttgaggaacaagagtttgtctgaccatgatgatgatggtggtgatgatggtgtgaagaagacgatgaaccaggatgtgtcccccatgagcacgtcgtgcaagggagcttcatcggtttcatatttcttccctctctttcgttgcaacgcagcccatgatcagagcaagctccagtctctagttttttaa

SEQ ID NO: 528 - protein, 146 aa, Arabidopsis thaliana
MSLKKRSCSRLRLTDLMEKWRKCKKGHFAVYTREGRRFVLPLDYLKHPIFQVLLEMAEEEFGSTICGPLQVPCDGGLMDHILMLLRNKSLSDHDDDGGDDGVKKTMNQDVSPMSTSCKGASSVSYFFPLFRCNAAHDQSKLQSLVF

SEQ ID NO: 529 - DNA, 462 bp, Arabidopsis thaliana
atggccggaagtcttgtaaaatgcagcaagatccgtcacattgtgagactcagacaaatgctccggcgatggcgtaacaaagcgcggttatcttcggtcagccgttgtgtaccgtcggatgttccatctggacacgtggcagtttgtgtgggtagcggttgcaggagatttgtggtgcgtgcgtcgtacctgaaccatcctatcataagcaatcttctggttcaagctgaggaagagtttggttttgctaaccaaggaccgttggttattccttgcgaagaatcggttttcgaagaagcgatccggtttatatcccggtctgattcttctcggtctagccggtttacttgtcctgatgatcttcagaaatgtaacggagggatcaaaatcaaaagcaagctagatctgatgattgaatctcgaccgttgcttcatggcgtcgctgagaaagctatctggtga

SEQ ID NO: 530 - protein, 153 aa, Arabidopsis thaliana
MAGSLVKCSKIRHIVRLRQMLRRWRNKARLSSVSRCVPSDVPSGHVAVCVGSGCRRFVVRASYLNHPIISNLLVQAEEEFGFANQGPLVIPCEESVFEEAIRFISRSDSSRSSRFTCPDDLQKCNGGIKIKSKLDLMIESRPLLHGVAEKAIW

SEQ ID NO: 531 - DNA, 327 bp, Arabidopsis thaliana
atgtccattctcaagaaatctacaaaactggctcaaacagcaatgcttaggcagattctgaagagatgttcaagcttggggaagaagaatggaggaggaggatatgaagaagttgatctcccacttgatgtacccaagggacacttccctgtctacgtaggacacaacagaagcagatacatagttcctatctctttcttgaccaatcttgacttccaatgtctccttagaagagctgaggaagagtttggttttgatcatgacatgggtctcaccattccttgtgatgaactcttctttcaagatctgacttccatgatccgatga

SEQ ID NO: 532 - protein, 108 aa, Arabidopsis thaliana
MSILKKSTKLAQTAMLRQILKRCSSLGKKNGGGGYEEVDLPLDVPKGHFPVYVGHNRSRYIVPISFLTNLDFQCLLRRAEEEFGFDHDMGLTIPCDELFFQDLTSMIR

SEQ ID NO: 533 - DNA, 261 bp, Arabidopsis thaliana
atggctatgatgcgaggtattttggctgcaagaaagattctaacaagcaaagcagcttcaacaccaaaaggatttcttgcggtatatgtaggggagagtcagaagaagagatatatggtgccagtttcgttcttgaaccagccttcttttcaagctctgctgagtacagccgaagaagagttcgggtttgatcatcctatgggtggcttgacaatcccttgtcctgaagatacttttgtcgctgcagcttctcagctatga

SEQ ID NO: 534 - protein, 86 aa, Arabidopsis thaliana
MAMMRGILAARKILTSKAASTPKGFLAVYVGESQKKRYMVPVSFLNQPSFQALLSTAEEEFGFDHPMGGLTIPCPEDTFVAAASQL

SEQ ID NO: 535 - DNA, 408 bp, Arabidopsis thaliana
atgctaggaaaaagaatagcttccttcaagaacttagcaaagaaaatgaagagcatcaacacgacgacgagaagcggaggagaaggcggctcggagtcaacttataacgagtctcttctgatgaatgaggcggacgaggcggcgatgatggcgtcaaagacgccgacggggacgtttgcggtgtacgtaggggaagagcgcgtgaagcgcgtggtaccaacaagctacttgaatcatcctctcttcaggatgctcctcgacaagtctcacgacgagtttctctgtttcgagcagaaggttatgttggtggtcccttgcagcctctccgttttccaagacgttgttaacgccgtcgagtcttgtaatggcaacttcgatttcggcgagtttgtcgaggagtttctataa

SEQ ID NO: 536 - protein, 135 aa, Arabidopsis thaliana
MLGKRIASFKNLAKKMKSINTTTRSGGEGGSESTYNESLLMNEADEAAMMASKTPTGTFAVYVGEERVKRVVPTSYLNHPLFRMLLDKSHDEFLCFEQKVMLVVPCSLSVFQDVVNAVESCNGNFDFGEFVEEFL

SEQ ID NO: 537 - DNA, 489 bp, Arabidopsis thaliana
atgaggaagatcatagggtttagaatcgggagacgagtctcaagatggatctttcgcaaaacccggatccaacgttcaggatacaaccggatacactcgacccagcaagcttgcatgctgatgagaccattagccaaactcaaaagttggggccaacgtctcaagcaaagtttcagacgcaggtctacgagaagatccgcatacatacccgttgatcataagaaagccgacccggttccaaggggacacttagctatctacgtgggtcaaaaagacggcgactgtcatagagttttggtacccatcgtttactttaaccatcctttgttcggtgagctgcttcgagaagccgaaaaagagtacggattttgccacgaaggaggtatcactattccttgtctgtattcagatttcgaacgggtcaagacccggatcgcatcggggtcaagttctcgggtatttccatggggccgtcattgccgcaattga

SEQ ID NO: 538 - protein, 162 aa, Arabidopsis thaliana
MRKIIGFRIGRRVSRWIFRKTRIQRSGYNRIHSTQQACMLMRPLAKLKSWGQRLKQSFRRRSTRRSAYIPVDHKKADPVPRGHLAIYVGQKDGDCHRVLVPIVYFNHPLFGELLREAEKEYGFCHEGGITIPCLYSDFERVKTRIASGSSSRVFPWGRHCRN

SEQ ID NO: 539 - DNA, 357 bp, Arabidopsis thaliana
atggaagaaactctagccactcccgacgccacgagacgctctctgtcaccgtcatgctcagccaccgtgaaatcacgcgccgctggtttcgagcgcagaaccaaacggagattgtcagagactaacgcaagcgtacgtgaagaccgagaagaagcagaagaagaagaagatgaggtcaaggaaaagattgaggcgttgcagaggattatccccggaggagcggcgcttggtgtggacgcgctcttcgaagagacagctggttacattctgtctctacaatgtcagatcaaaaccattaaagtccttacttcgtttcttcaacgcatagatcaagaagacatgaagttcggaggttga

SEQ ID NO: 540 - protein, 118 aa, Arabidopsis thaliana
MEETLATPDATRRSLSPSCSATVKSRAAGFERRTKRRLSETNASVREDREEAEEEEDEVKEKIEALQRIIPGGAALGVDALFEETAGYILSLQCQIKTIKVLTSFLQRIDQEDMKFGG

SEQ ID NO: 541 - DNA, 375 bp, Arabidopsis thaliana
atgaagagcaagttcattaagtcctgtgaaaagaaactgaaaaagatgacgagcaaagtcataataccttgtgcgtcttgcgagtcatgctacgagagaatttgctgggcattcaagaaggaagctgaggtgattccaagagatgtccctaagggacatttggttgtctatgtgggtgaagagtacaagaggtttgtgataaatatcaacctgcttaaacacccactcttccaagcattgctggatcaagcacaggatgcttacggtttcagtgctgactccagactatggattccatgcaatgagagtactttcctcgatgttgtccgttgcgctggtgcaccccagcatcagaataactgcatatgtatctag

SEQ ID NO: 542 - protein, 124 aa, Arabidopsis thaliana
MKSKFIKSCEKKLKKMTSKVIIPCASCESCYERICWAFKKEAEVIPRDVPKGHLVVYVGEEYKRFVININLLKHPLFQALLDQAQDAYGFSADSRLWIPCNESTFLDVVRCAGAPQHQNNCICI

SEQ ID NO: 543 - DNA, 339 bp, Arabidopsis thaliana
atggcaataaagagatcgagcaaagcgacgtcgtctcaagcagcatctatcaagcaaatagtaaagagatgctcgagtctaagaaagatgaagaacgtaaatggttgttactataaccaagaagatgatcttcctcaagacgtgccaaaaggtcattttccggtttacgtgggaccgaaccgaagtcggtacatcgttcctatctcatggctccatcactccgagttccaaacattgctccgactagctgaggaagaatttgggtttgaccatgatatgggtctaaccattccttgtgatgaagtcttcttcaggtctcttatctccatgtttagataa

SEQ ID NO: 544 - protein, 112 aa, Arabidopsis thaliana
MAIKRSSKATSSQAASIKQIVKRCSSLRKMKNVNGCYYNQEDDLPQDVPKGHFPVYVGPNRSRYIVPISWLHHSEFQTLLRLAEEEFGFDHDMGLTIPCDEVFFRSLISMFR

SEQ ID NO: 545 - DNA, 537 bp, Arabidopsis thaliana
atggaagccaagaagtcaaacaagatcagagagatcgttaagcttcaacagcttctcaagaaatggcgaaaacaagcaattgcatcaaaagcagccaacaacaacaacgaagacaacaatagcagtggcgggggaagcaagagcatcaagtttctgaagaggacactgtcatttacagatgtaacagctgtgcctaaagggtatctagctgtttcggtcgggttagagaagaagaggtacacaataccaaccgagtacctcagccatcaagctttctatgttcttctgcgtgaggcagaagaagagttcgggtttcaacaagccggtgtcttgaggattccttgtgaagtttctgtttttgagagcatattgaagataatggaggagaagaacgaagggtacctggtgacgccaataacagctaagcaggaatgtaagttcaatgcagcagcagatgataagacgagttaccagcatccatcagactgtcctaagactccttcacaccaacctcacaacagcccaatgtgcagatag

SEQ ID NO: 546 - protein, 178 aa, Arabidopsis thaliana
MEAKKSNKIREIVKLQQLLKKWRKQAIASKAANNNNEDNNSSGGGSKSIKFLKRTLSFTDVTAVPKGYLAVSVGLEKKRYTIPTEYLSHQAFYVLLREAEEEFGFQQAGVLRIPCEVSVFESILKIMEEKNEGYLVTPITAKQECKFNAAADDKTSYQHPSDCPKTPSHQPHNSPMCR

SEQ ID NO: 547 - DNA, 366 bp, Arabidopsis thaliana
atgggcaccggagaaaaaaccctgaagagcttccagttacatcgcaaacaatcagtcaaagtcaaagatgttccaaaagggtgtttagcgatcaaagtgggatcgcaaggagaagagcaacagagatttatcgttcctgttttgtattttaaccatccattgttcatgcagctcctgaaagaagcagaagacgagtatggattcgatcaaaagggcaccatcacaattccttgtcacgtggaggagtttcgttacgttcaagctttgatagatggagagagatcagtttacaatggtaacaaccatcatcatagacatggtggccgtgaccagtatcatcatcttgttggatgcttcagagcttga

SEQ ID NO: 548 - protein, 121 aa, Arabidopsis thaliana
MGTGEKTLKSFQLHRKQSVKVKDVPKGCLAIKVGSQGEEQQRFIVPVLYFNHPLFMQLLKEAEDEYGFDQKGTITIPCHVEEFRYVQALIDGERSVYNGNNHHHRHGGRDQYHHLVGCFRA

SEQ ID NO: 549 - DNA, 282 bp, Arabidopsis thaliana
atggctttggtgagaagtctctttagcgcaaagaagattcttggcggttctttagtaaaaacaagcaaggcaccgccaaaagggtttcttgcagtgtacgtcggcgagagccagaagaagcagagacattttgtaccagtctcatacttgaaccagcctttgtttcaagatcttctaagcaaatgtgaagaagagtttggttttgatcatccgatgggcggcttgacaatcccttgtcctgtagatacttttatcagtataacatctcagctccaaggatga

SEQ ID NO: 550 - protein, 93 aa, Arabidopsis thaliana
MALVRSLFSAKKILGGSLVKTSKAPPKGFLAVYVGESQKKQRHFVPVSYLNQPLFQDLLSKCEEEFGFDHPMGGLTIPCPVDTFISITSQLQG

SEQ ID NO: 551 - DNA, 288 bp, Arabidopsis thaliana
atggctttggtgagaagtctctttgtttcaaacaagatacttggaggctcattagcaggaatgagaaaatcaacttcagcaccaaaagggtttcttgcagtgtacgtaggggagagccagaagaagcagagatacttagtgctagtctcatacttgagccagccattgtttcaagatcttctcagtaaatccgaggaagagttcggatttgatcatccgatggggggcttgacgatcccttgtcctgaagataccttcctcactgtaacttctcggatccaaggatga

SEQ ID NO: 552 - protein, 95 aa, Arabidopsis thaliana
MALVRSLFVSNKILGGSLAGMRKSTSAPKGFLAVYVGESQKKQRYLVLVSYLSQPLFQDLLSKSEEEFGFDHPMGGLTIPCPEDTFLTVTSRIQG

SEQ ID NO: 553 - DNA, 279 bp, Arabidopsis thaliana
atggctttggtgagaagtatcttcagtgcaaagaagattcttggcggctccttagcaagaacgagcaaagcaccaaaaggttttcttgcggtgtacgtcggtgagaaccaagagaagaagcagagatactttgtaccagtctcatacttgaagcagccttcatttcaggcccttctcagtaaatgcgaagaagagtttggttttgatcatccaatgggcggcttgacaatttgttgtcctgaatacacatttatcagcataacttctaggatccaatga

SEQ ID NO: 554 - protein, 92 aa, Arabidopsis thaliana
MALVRSIFSAKKILGGSLARTSKAPKGFLAVYVGENQEKKQRYFVPVSYLKQPSFQALLSKCEEEFGFDHPMGGLTICCPEYTFISITSRIQ

SEQ ID NO: 555 - DNA, 291 bp, Arabidopsis thaliana
atggctttggtaagaggtttcatggctgcaaagaagattcttggtggctcagtagcaggaacgaggaaagaaacttcagcaccaaaagggtttcttgcagtgtacgtcggtgagagccagaggaagaagcagagacaccttgtgccggtctcatacttgaaccagcctttgtttcaagctctactcatcaaagctgaagaagagttcggattcaatcatccgatgggcggcttgacgatcccttgtcctgaagatactttcctcactgtaacgtctcagatccaaggatga

SEQ ID NO: 556 - protein, 96 aa, Arabidopsis thaliana
MALVRGFMAAKKILGGSVAGTRKETSAPKGFLAVYVGESQRKKQRHLVPVSYLNQPLFQALLIKAEEEFGFNHPMGGLTIPCPEDTFLTVTSQIQG

SEQ ID NO: 557 - DNA, 411 bp, Arabidopsis thaliana
atgggttccggagaaaaaatcctcaagagcgtccattcaaaccgtcccaataacgtgaaaagcaatagcaaacatgggatcaaagatgtgccaaaagggtgtttagcaatcaaagtgggatcaaaagaagaggagaaacagagatttgttgttcctgttttttattttaaccatccattgttcatgcaactcctaagggaagcagaggaagagtatggattcgagcagaaaggtaccatcacaatcccttgccacgtggaagtttttcgatatgttcaagacatgatcaacagagagagatcgcttgatgatgatgatgatgcaagcaagcaaacgggttgtggagccaaacacggcctaacccacaagattaggagtagaagttctagtggtgtttggaaatatccataa

SEQ ID NO: 558 - protein, 136 aa, Arabidopsis thaliana
MGSGEKILKSVHSNRPNNVKSNSKHGIKDVPKGCLAIKVGSKEEEKQRFVVPVFYFNHPLFMQLLREAEEEYGFEQKGTITIPCHVEVFRYVQDMINRERSLDDDDDASKQTGCGAKHGLTHKIRSRSSSGVWKYP

SEQ ID NO: 559 - DNA, 321 bp, Arabidopsis thaliana
atggagataaaggaagcaagtaagactcaaagagaaagacgaggagcatcgtcactaaagcagatgctgatgaagagatgttcaagcttcgtgaagaagagcaacgaagaagacgtgcccaagaagggctatttcgctgtctacgtgggccacttcagagaccgccacgtcatcccaatcacatccctcaaccatccaaccttcaagatgatgctgcaaaaatcggaggaagagtttgggtttaggcaagagagcggcctcaccattccttgtgaccaaaacacctttctcactctcttagactcaatcacatcttactag

SEQ ID NO: 560 - protein, 106 aa, Arabidopsis thaliana
MEIKEASKTQRERRGASSLKQMLMKRCSSFVKKSNEEDVPKKGYFAVYVGHFRDRHVIPITSLNHPTFKMMLQKSEEEFGFRQESGLTIPCDQNTFLTLLDSITSY

SEQ ID NO: 561 - DNA, 483 bp, Arabidopsis thaliana
atggatgaaaacaacgcggcaaagttaaccgggatcaagcagattgtgagactaaaggagattcttcaaaaatggcaaactgtcacaataggttcaaagtcagatgatggagagttgggagctagaaaacacacagctatcatttcaccggttatcaacaagaggctattggatttgaagacttgtgactcggacgaggaaactacttgccaaagccctgagccaccgcctgatgtccctaaaggatatttggcggtttatgttggacccgagctccggagatttatcatacccacaaactttcttagccattctttgttcaaggtcttgcttgagaaggctgaggaagagtatggatttgatcacagcggtgcgttaaccattccttgtgaagttgagactttcaagtacttacttaagtgcattgagaaccatcctaaagatgacacctcggctgaagatccagtagaaacggaagagtaa

SEQ ID NO: 562 - protein, 160 aa, Arabidopsis thaliana
MDENNAAKLTGIKQIVRLKEILQKWQTVTIGSKSDDGELGARKHTAIISPVINKRLLDLKTCDSDEETTCQSPEPPPDVPKGYLAVYVGPELRRFIIPTNFLSHSLFKVLLEKAEEEYGFDHSGALTIPCEVETFKYLLKCIENHPKDDTSAEDPVETEE

SEQ ID NO: 563 - DNA, 342 bp, Arabidopsis thaliana
atgtgcaaaaagtttaagattttcatgagaaagctacaaatttgctgcttattcactagattctctaaaagggtagggaattattgtgagtttgaggaagagggtaatgctgcatcaatgattccaagtgatgtgaaggaagggcatgtagcagtgattgcggttaagggagagagaattaagaggtttgttttagagcttgaagagttgaacaaaccagagttcttgaggctgctcgaacaagcgagagaggaattcgggtttcaaccaagaggacctctgaccatcccatgccagccggaagaagtacagaagattctacaaggaagtagagagtcttga

SEQ ID NO: 564 - protein, 113 aa, Arabidopsis thaliana
MCKKFKIFMRKLQICCLFTRFSKRVGNYCEFEEEGNAASMIPSDVKEGHVAVIAVKGERIKRFVLELEELNKPEFLRLLEQAREEFGFQPRGPLTIPCQPEEVQKILQGSRES

SEQ ID NO: 565 - DNA, 357 bp, Arabidopsis thaliana
atgatttcgctaagtttcatcgtgcgtctagcaaaccaggagaacagacgaaacagaaggtacgaaactaacattaaggatcgtcttgtctcgggggagttatcggacggtagcagaccagccagagatcaaaacggtgtcccgagaggacatcttgcggtctatgtggggcgcgaagagaggcaaaggtttgtgataccgaccaagtatcttcaatatcctgaatttaggagtttgatggatgaagtagcggacgagtttgggtacgatcatgaaggagggattcatattccttgtgaagaaagtgtttttgaagagattttgattagatacatgtcttgtgacaagaagaaataa

SEQ ID NO: 566 - protein, 118 aa, Arabidopsis thaliana
MISLSFIVRLANQENRRNRRYETNIKDRLVSGELSDGSRPARDQNGVPRGHLAVYVGREERQRFVIPTKYLQYPEFRSLMDEVADEFGYDHEGGIHIPCEESVFEEILIRYMSCDKKK

SEQ ID NO: 567 - DNA, 399 bp, Arabidopsis thaliana
atgaagcaactaatccgtcgtctctctcgcgtcgctgattccgctcaatacagtctcctccgttccgattcacagcgacctagccgccgttccgaatccttcctccgttcttcggtgactcgccgctcaaagaagcaaacctcctctgttcccgaaggacacgtaccggtctacgtaggtgacgagatggagaggttcgtcgttagcgcggagctacttaaccatccggttttcatcggtttactaaaccgatctgctcaagagtatggttacgagcaaaaaggagttctacaaatcccttgccatgtccttgtcttcgaacgaatcatggaatcgcttcgtcttggacttccggtaccgattgatgttcaggatctaatcggtgacgggactatttga

SEQ ID NO: 568 - protein, 132 aa, Arabidopsis thaliana
MKQLIRRLSRVADSAQYSLLRSDSQRPSRRSESFLRSSVTRRSKKQTSSVPEGHVPVYVGDEMERFVVSAELLNHPVFIGLLNRSAQEYGYEQKGVLQIPCHVLVFERIMESLRLGLPVPIDVQDLIGDGTI

SEQ ID NO: 569 - DNA, 357 bp, Arabidopsis thaliana
atggagaaaaccctagccacttcccataccaaacgctcttctcctccgtctccatcctccgccgtgaacacaagctccactggtttcaaccgcagaaccagacagagattgtccgatgcaacggcgagtgtaagcgagaccgacgtagaagatgaagatgaagatgaagaaggagtggaggagaagatcgaggcgcttcagacaatagttcccggaggaacggaacttggtgtcgacgcgctgttcgaagagacagctagttacattttggctctgcaatgtcagatcaatgccattaaagttcttactacgtttcttgagcgttgtgagaaaaaagatatgaagtttggaggttga

SEQ ID NO: 570 - protein, 118 aa, Arabidopsis thaliana
MEKTLATSHTKRSSPPSPSSAVNTSSTGFNRRTRQRLSDATASVSETDVEDEDEDEEGVEEKIEALQTIVPGGTELGVDALFEETASYILALQCQINAIKVLTTFLERCEKKDMKFGG

SEQ ID NO: 571 - DNA, 513 bp, Arabidopsis thaliana
atgaggaagttaagaggaatcaaaattagaagaccgattaaacaaatctcaagatggatcctccggagaattaagattcgtcgttcaagatacacccggttaagcccaaaccgcccggtttgcaagccgagagccatcacaaaactcataagttggggtcgaagtctcacatcccacagcgccaggtttattgggtctaaatgctccaattcagggtacataccaattggtcaagaacccattcgagaaaagcccgacccggttccgaaaggtcactcggcggtttacatcggtaaaaaagacggcgactttcagagagttttggtgcctatcgtttactttaaccatcctctgtttggtgagcttcttagagaggctgaagaagaatttgggttttctcaagaaggtggaatcactatcccttgtccttactcagatttcaaacgggtccaaacccgaattgaatccgggtcgggtttctgtaaatttccctggagccggcggtggcaataa

SEQ ID NO: 572 - protein, 170 aa, Arabidopsis thaliana
MRKLRGIKIRRPIKQISRWILRRIKIRRSRYTRLSPNRPVCKPRAITKLISWGRSLTSHSARFIGSKCSNSGYIPIGQEPIREKPDPVPKGHSAVYIGKKDGDFQRVLVPIVYFNHPLFGELLREAEEEFGFSQEGGITIPCPYSDFKRVQTRIESGSGFCKFPWSRRWQ

SEQ ID NO: 573 - DNA, 330 bp, Arabidopsis thaliana
atgaagagcaaatccatagttctaccttgttgtacatcttcatgcgagagttgctgcgacaaggtttcttggggattcaagaaggaaaatgaagcaatacctaaagatgttccgagaggacatttggtagtgtatgttggtgatgattacaagaggtttgtgataaagatgagtttgcttactcatccaatctttaaagcattgcttgatcaagcgcaagatgcttataattcatcaagactatggattccatgtgatgagaacacttttctcgatgttgttcgttgcagtggcgctcctcagcatcagagaaactgcattggcatgtaa

SEQ ID NO: 574 - protein, 109 aa, Arabidopsis thaliana
MKSKSIVLPCCTSSCESCCDKVSWGFKKENEAIPKDVPRGHLVVYVGDDYKRFVIKMSLLTHPIFKALLDQAQDAYNSSRLWIPCDENTFLDVVRCSGAPQHQRNCIGM

SEQ ID NO: 575 - DNA, 315 bp, Arabidopsis thaliana
atgggtatccaattgatcggactctctcaggcaaagcaaaagcttcaaagaagcttatcagcgagaatcgcaagcctcttggctacgtcgggtactaataatgtcccaaagggtcatgtggccgtctatgtgggagagacttatcacaggaagagatttgtgatacctatatcgtatttaaaccacccattgttccaaggtttgttgaacctcgcggaagaagagttcgggttcgaccatcccatgggaggtctcaccatcccttgcactgaagattacttcaccgctctagcttctattctaagtggttcatga

SEQ ID NO: 576 - protein, 104 aa, Arabidopsis thaliana
MGIQLIGLSQAKQKLQRSLSARIASLLATSGTNNVPKGHVAVYVGETYHRKRFVIPISYLNHPLFQGLLNLAEEEFGFDHPMGGLTIPCTEDYFTALASILSGS

SEQ ID NO: 577 - DNA, 321 bp, Arabidopsis thaliana
atgattcgattcaagactatagtttttcaagtcaagagagtactcgataaaaagatatcgcgtttaagacacataatcaacgtacgaaagggtcactttgcggtatatgttggagaagacgagatggagacgaagagatttgtggttccaatatcttacttaaaccatcctttgttccaagccttgttgcgtaaagccgaagatgaatttggcacagatcatcagaggacatacctcacaattccttgtgctaaagatgtctttcttgacatcacttctcgtctgaagcgtaataaatttattagtactgaaattaattaa

SEQ ID NO: 578 - protein, 106 aa, Arabidopsis thaliana
MIRFKTIVFQVKRVLDKKISRLRHIINVRKGHFAVYVGEDEMETKRFVVPISYLNHPLFQALLRKAEDEFGTDHQRTYLTIPCAKDVFLDITSRLKRNKFISTEIN

SEQ ID NO: 579 - DNA, 327 bp, Arabidopsis thaliana
atgggtttaatgaggtcgatgcttccaaatgcaaagcaaatcttcaaatcacaatctatgaggaacaagaacggatcatcctcaccatcaacaacaacaacaacttcagggcttgttccgaaaggtcacgtagcggtttacgttggagaacaaatggagaagaagaggtttgtggttccaatatcatacttgaaccatcctttgttcagagaatttcttaatcgcgctgaggaagaatgcggatttcatcactctatgggtggcttgacgataccttgtcgagaagagtcgtttctttatctcattacttctcatcagctgcattga

SEQ ID NO: 580 - protein, 108 aa, Arabidopsis thaliana
MGLMRSMLPNAKQIFKSQSMRNKNGSSSPSTTTTTSGLVPKGHVAVYVGEQMEKKRFVVPISYLNHPLFREFLNRAEEECGFHHSMGGLTIPCREESFLYLITSHQLH

SEQ ID NO: 581 - DNA, 285 bp, Arabidopsis thaliana
atggcgattagattgtcgcgtgtgatcaactctaaacagtcccaaaaacagcaatctcgagtcccgaaaggacatgttgcggtttatgtcggagaagagatggagagcaagaagagattcgtggttccgatttcgtatttgaaccatccttcatttcaaggtttgcttagtagagcagaggaagagtttggtttcaatcatccaatcggtggattaacgattccatgcagagaagaaacatttgttggtcttttgaattcttatggttgtattgtttcaacttga

SEQ ID NO: 582 - protein, 94 aa, Arabidopsis thaliana
MAIRLSRVINSKQSQKQQSRVPKGHVAVYVGEEMESKKRFVVPISYLNHPSFQGLLSRAEEEFGFNHPIGGLTIPCREETFVGLLNSYGCIVST

SEQ ID NO: 583 - DNA, 318 bp, Arabidopsis thaliana
atgggtctgagccgttttgcgatatcaaatgcaacaaagcagatattgaagctaaactcattggcaaacagaaaccgaacctcatcatcatcatcggatcatgtccctaaaggacacgtagcagtttatgtaggagaacagattgagatggagaagaagagattcgtggttccaatatcgtttctgaatcatccttccttcaaagagttccttagtcgagcagaggaagagtttggattcaatcatccaatgggaggcttgaccattccttgtagagaagaagtttttcttgatctcatcgcttctcggttacaataa

SEQ ID NO: 584 - protein, 105 aa, Arabidopsis thaliana
MGLSRFAISNATKQILKLNSLANRNRTSSSSSDHVPKGHVAVYVGEQIEMEKKRFVVPISFLNHPSFKEFLSRAEEEFGFNHPMGGLTIPCREEVFLDLIASRLQ

SEQ ID NO: 585 - DNA, 279 bp, Arabidopsis thaliana
atggctttcttaaggagttttttcgctaccaagcatatcattcgccggtcttttactacggaatcattatcaacgcctaaagggttctttgctgtgtatgttggagaaaatctgaagaagaagagatatcttgttccggtttgttacttgaacaagccatctttccaagctttgcttaggaaagcagaagaagagttcggttttaatcatccaacgggcggtttgagtttaccatgcgacgaagctttcttcttcactgtcacttctcagattcgttaa

SEQ ID NO: 586 - protein, 92 aa, Arabidopsis thaliana
MAFLRSFFATKHIIRRSFTTESLSTPKGFFAVYVGENLKKKRYLVPVCYLNKPSFQALLRKAEEEFGFNHPTGGLSLPCDEAFFFTVTSQIR

SEQ ID NO: 587 - DNA, 570 bp, Arabidopsis thaliana
atggaggccaagaagtcaaacaaaatcagagagatcgttaagcttcaacagatcctcaagaaatggcgaaaagttgcacacgcatcaaaacaagccaacaacaacaagatcgacaacgtagatgacagcaacaacaacatcagcatcaacatcaacaacaatggaagtggaagtggaagtggaagcaagagcatcaagtttctgaagagaacactatccttcacagacacaacagctattcctaaaggctacttagctgtctcggtggggaaggaggagaaaagatacaagataccaacagagtaccttagccaccaagctttccatgtgctgttgcgtgaagcagaagaagagtttgggtttgaacaagctggtatcttgaggattccttgtgaagttgctgtgttcgagagcattttgaagataatggaggacaacaagagtgatgcgtacctgaccactcaagagtgcagattcaatgccacaagtgaggaagtgatgagttatcgtcatccttcggattgcccgaggacaccatctcaccaacctcacagcccaatgtgcagatag

SEQ ID NO: 588 - protein, 189 aa, Arabidopsis thaliana
MEAKKSNKIREIVKLQQILKKWRKVAHASKQANNNKIDNVDDSNNNISININNNGSGSGSGSKSIKFLKRTLSFTDTTAIPKGYLAVSVGKEEKRYKIPTEYLSHQAFHVLLREAEEEFGFEQAGILRIPCEVAVFESILKIMEDNKSDAYLTTQECRFNATSEEVMSYRHPSDCPRTPSHQPHSPMCR

SEQ ID NO: 589 - DNA, 312 bp, Arabidopsis thaliana
atgccgcacaaggtcattgacatgcacttccacgaaagagaagaagaagaagatactggtgagagtagatcatcctcaagaacaccgagagggcatttcgtcgtttacgtcggtacgaagaagaagttggaaagattcgtgatccccacaacgtttttgaagagcccttcattccaaaagcttctagacaatgcggccgaggaattcggttacgcggaagctcaccgggacaagattgtattgccttgtgatgtctctactttccgaagtcttgtcatgttcctgacttctcatcaggacaagtcacattaa

SEQ ID NO: 590 - protein, 103 aa, Arabidopsis thaliana
MPHKVIDMHFHEREEEEDTGESRSSSRTPRGHFVVYVGTKKKLERFVIPTTFLKSPSFQKLLDNAAEEFGYAEAHRDKIVLPCDVSTFRSLVMFLTSHQDKSH

SEQ ID NO: 591 - DNA, 369 bp, Arabidopsis thaliana
atgggtaacggagacaaagtcatgagccactggagcttccacatcccacgtctccatcatcatgagcatgatcatgaaaaggtaccaaaagggtgtttggcagtgaaggtaggacaaggagaagagcaagagagatttgtgattcccgttatgtactttaatcatcctttgtttggacaactcttgaaggaagctgaagaagagtttggttttgctcaaaaagggacaatcacgatcccttgtcacgttgaggagtttaggtatgttcaaggattgatcgatcgagaaaacactagatttctcggtactaatctccttgatcatcaccatcatcatcacaaccatctcatccggtgttttagggtttga

SEQ ID NO: 592 - protein, 122 aa, Arabidopsis thaliana
MGNGDKVMSHWSFHIPRLHHHEHDHEKVPKGCLAVKVGQGEEQERFVIPVMYFNHPLFGQLLKEAEEEFGFAQKGTITIPCHVEEFRYVQGLIDRENTRFLGTNLLDHHHHHHNHLIRCFRV

SEQ ID NO: 593 - DNA, 315 bp, Arabidopsis thaliana
atggcgataaagaagtcgaacaaagcggcgttgtctcaagcagcatctctaaagcaaatcttgaagaggtgctcaagtctaggaaagaagaatcaaggtaattgctacttcaacgacgtgccaaaaggtcacttcccggtctacgtcggtcaacaccgaagtcgctatgtggtcccaatctcgtggctagatcatcatgagttccagtcactcctccaactagccgaggaagagtttggtttcgagcacgagatgggtctcactatcccttgtgatgaagtcgtctttcgttctctcatctcaatgttcagataa

SEQ ID NO: 594 - protein, 104 aa, Arabidopsis thaliana
MAIKKSNKAALSQAASLKQILKRCSSLGKKNQGNCYFNDVPKGHFPVYVGQHRSRYVVPISWLDHHEFQSLLQLAEEEFGFEHEMGLTIPCDEVVFRSLISMFR

SEQ ID NO: 595 - DNA, 345 bp, Arabidopsis thaliana
atgatgaagaagagcaagctgatcgcaaaggcatggaagcaaatgtcaagcagagttgccaaacaccgcgtcgccaccggaaatcctaaggatcaatatcatataccacatgacgtaccaaagggacaccttgtggtgtacgttggtaaagatgaggaaacttataagaggttcgttataaagatcacgttgcttcacgatcccatcttcagagctttgcttgatcaatcaaaagatgaagcttacgacgatttcacttccggagattccaagctttgtattgcttgtgacgaaactctctttctcgaggtcctccgttgcgcttctcctcgttattcgttatga

SEQ ID NO: 596 - protein, 114 aa, Arabidopsis thaliana
MMKKSKLIAKAWKQMSSRVAKHRVATGNPKDQYHIPHDVPKGHLVVYVGKDEETYKRFVIKITLLHDPIFRALLDQSKDEAYDDFTSGDSKLCIACDETLFLEVLRCASPRYSL

SEQ ID NO: 597 - DNA, 273 bp, Arabidopsis thaliana
atggctttggtgagaagtctattggttgcaaagaagattcttagccgctccgccgcagcagtctcggcgccaccaaaagggtttcttgcagtgtacgtaggagagagccagaagaagagatatttagtgccactctcatacttgaaccagccttcttttcaagctctgctcagtaaatccgaagaagagtttgggttcgatcatccgatgggtggcttaacgatcccttgtcccgaagatactttcatcaatgtgacttctcggctccattga

SEQ ID NO: 598 - protein, 90 aa, Arabidopsis thaliana
MALVRSLLVAKKILSRSAAAVSAPPKGFLAVYVGESQKKRYLVPLSYLNQPSFQALLSKSEEEFGFDHPMGGLTIPCPEDTFINVTSRLH

SEQ ID NO: 599 - DNA, 273 bp, Arabidopsis thaliana
atggctttcgtgagaagtctattgggagcaaagaagattctaagccgctccaccgcagcaggatctgcggcaccaaaagggtttcttgcggtgtacgtaggagagagccagaagaagagatatttggtgccgctctcatacttgagccaaccgtcatttcaagctctgctcagtaaatccgaagaagagtttgggtttgctcatccgatgggtggcttaacgatcccttgtcccgaagatactttcatcaatgtgacttctcggctccaatga

SEQ ID NO: 600 - protein, 90 aa, Arabidopsis thaliana
MAFVRSLLGAKKILSRSTAAGSAAPKGFLAVYVGESQKKRYLVPLSYLSQPSFQALLSKSEEEFGFAHPMGGLTIPCPEDTFINVTSRLQ

SEQ ID NO: 601 - DNA, 276 bp, Arabidopsis thaliana
atggcttttgtgagaagtctattgggagcaaagaagattctaagccgctccaccacagcagcctcggcggcaccaaaagggtttcttgcagtgtacgtaggtgagagccaaaagaagagatatctggtgccaatctcatatttaaaccagccttcatttcaagctcttctcagtaaatccgaggaagagtttggattcgatcatccaatgggtggcttaacgatcccctgtcctgaagatacattcatcaatgtgacttctcggttccaacgatga

SEQ ID NO: 602 - protein, 91 aa, Arabidopsis thaliana
MAFVRSLLGAKKILSRSTTAASAAPKGFLAVYVGESQKKRYLVPISYLNQPSFQALLSKSEEEFGFDHPMGGLTIPCPEDTFINVTSRFQR

SEQ ID NO: 603 - DNA, 267 bp, Arabidopsis thaliana
atggctttggtgagaagtctattgggtgcaaagaagattctaagccgctccaccgcatcggcggcaccaaaagggtttcttgcggtgtacgtaggagagagccagaagaagagatatttggtgccgctctcatacttgagccaaccttcatttcaagctcttctcagtaaatccgaggaagagtttggatttgatcatccaatgggtggcttaacgatcccttgtcctgaagataccttcatcaatgtgacttctcggctccaatga

SEQ ID NO: 604 - protein, 88 aa, Arabidopsis thaliana
MALVRSLLGAKKILSRSTASAAPKGFLAVYVGESQKKRYLVPLSYLSQPSFQALLSKSEEEFGFDHPMGGLTIPCPEDTFINVTSRLQ

SEQ ID NO: 605 - DNA, 273 bp, Arabidopsis thaliana
atggctctggtgagaagtctactgggtgcaaaaaagattctaagccgctccaccgcagcagtctcggcggcaccaaaagggtttcttgcagtgtacgtaggagagagccagaagaaaagatacttagtgccactctcatacttgaaccaaccttcttttcaagctctgctcagtaaatctgaagatgagtttgggtttgatcatccgatggggggcttaacgataccttgtcatgaagatacgttcatcaatgtgacttctcggctccaatga

SEQ ID NO: 606 - protein, 90 aa, Arabidopsis thaliana
MALVRSLLGAKKILSRSTAAVSAAPKGFLAVYVGESQKKRYLVPLSYLNQPSFQALLSKSEDEFGFDHPMGGLTIPCHEDTFINVTSRLQ

SEQ ID NO: 607 - DNA, 336 bp, Arabidopsis thaliana
atgagaaccttggtgaagaagctactatggtgcggagcgaagaacatttcatcttcgagaacatcggcattaccagaagaaggaagagttcgggtttacgtaggtaaagataaagagagtcaatgcaagctagaagttgaagctaatttgctaaaccacccaatgttggaagatctattgaggttgtctgaggaagaattcggacactcgtacgaaggagccttgaggattgcttgcgagattgatgtcttcatcaaactggttaatctacacaaaacaactaatcatcataacaattccgtttgctttcacaataattccacaaaattattgtag

SEQ ID NO: 608 - protein, 111 aa, Arabidopsis thaliana
MRTLVKKLLWCGAKNISSSRTSALPEEGRVRVYVGKDKESQCKLEVEANLLNHPMLEDLLRLSEEEFGHSYEGALRIACEIDVFIKLVNLHKTTNHHNNSVCFHNNSTKLL

SEQ ID NO: 609 - DNA, 552 bp, Arabidopsis thaliana
atgaagaatccgatattgaagacatggagaaaagtgaagtcttttgggcatacgagctcttcgaccacaccctcgttcacgaagagcaagtcttgccatggctcttttcgtctcgaggatgctaagagcaacgaatcaaaaggaaagccgaagaaagagtcgccgtcacatggatttttcacggtttacgttggtcccacgaaacaaagaattgttgtgaagacaaaacttctgaaccatcctttgttcaagaacttgttagaagatgctgagactgagtatggatatagacgcgatggacccattgttcttccttgtgaggttgacttcttcttcaaggctttggcggatatgaagtctaatcctggtcatcatgatcatgatgatgattatgatgatgatgatggtttcacgaattccccgatttgcggatttgtctgtagtccctatagatcatacggtggtggtgttacggatcctctggccatgaaacggaacggctcatacaagcttcttcgatctccatctttgttcaagttgactagattttga

SEQ ID NO: 610 - protein, 183 aa, Arabidopsis thaliana
MKNPILKTWRKVKSFGHTSSSTTPSFTKSKSCHGSFRLEDAKSNESKGKPKKESPSHGFFTVYVGPTKQRIVVKTKLLNHPLFKNLLEDAETEYGYRRDGPIVLPCEVDFFFKALADMKSNPGHHDHDDDYDDDDGFTNSPICGFVCSPYRSYGGGVTDPLAMKRNGSYKLLRSPSLFKLTRF

SEQ ID NO: 611 - DNA, 429 bp, Arabidopsis thaliana
atgggttttgaagaaaaccaaaaacagagtccaaaacagagtccgaatcatatcaagcatatggtgttcaagttccacttccatgttcctcatctccacatactccctcatcatcaccaccaccaccaccatgatgttcctaaaggctgtgtagcgattatggtgggacacgaagacgatgaagaaggtctacatagatttgttgttccgttggtgttcttgagccatcctttgttcttggatctcttgaaagaagctgaaaaagagtatggattcaagcatgatggtccgattacgattccttgcggtgttgatgagtttaagcatgttcaagaagttatcgacgaggagactcatcgccgtcatagtcacggtggtcacggccacaacaaccataaccatcacaacaaccatttgcgatgtttctaa

SEQ ID NO: 612 - protein, 142 aa, Arabidopsis thaliana
MGFEENQKQSPKQSPNHIKHMVFKFHFHVPHLHILPHHHHHHHHDVPKGCVAIMVGHEDDEEGLHRFVVPLVFLSHPLFLDLLKEAEKEYGFKHDGPITIPCGVDEFKHVQEVIDEETHRRHSHGGHGHNNHNHHNNHLRCF

SEQ ID NO: 613 - DNA, 429 bp, Arabidopsis thaliana
atgatgataaacgcaaagacgctcatgaagttggctaagacatggcaacaaagagcagccctcaagaggaaaagaatttcatttcagagatcaagtattactactactagcagccaaacaactgtagaaaagggttgtttcgtggtttacacggctgataagatccgtttttcatttcccttaagttacctaagcaacactattgtccaagagctcttgaaaatatctgaagaagagttcggtctcccgacggaaggaccaatcacattgccattcgattcggtctttttagagtatctcatcaaactgatccaaagacgaatggatgaagatacagaaaaggctctgttatggtcaatctcaagtgctagatgctctttgcaaccacaacaacattgtagtgctactcaacagttgcttgtgttttag

SEQ ID NO: 614 - protein, 142 aa, Arabidopsis thaliana
MMINAKTLMKLAKTWQQRAALKRKRISFQRSSITTTSSQTTVEKGCFVVYTADKIRFSFPLSYLSNTIVQELLKISEEEFGLPTEGPITLPFDSVFLEYLIKLIQRRMDEDTEKALLWSISSARCSLQPQQHCSATQQLLVF

SEQ ID NO: 615 - DNA, 573 bp, Arabidopsis thaliana
atggatgaaaacaacgcggccaagttaaccggtatcaggcagattgtcaggcttaaggagattttgcagaaatggcaaaccgtcaccataggccccaagtcagaagttcctccattggcagctggaaagcaagcagtggcgatgatttcgcccgccatcaacaagaggctattagatgtcaagaacggtgactcggatgaggaaacctgtcaaagtcctgagccgcctcatgatgttcctaaagggaatcttgctgtttatgttggaccggagctaaggaggtttatcataccgacaagctatcttagccactctctgttcaaggttttgctcgagaaagcagaggaagagtttgggtttgatcagagcggtgcgctcaccatcccttgcgaggtcgagactttcaagtacttgcttaagtgcatggagaacaatcttaaagatcttcatcctgatgacaactctggtaagccccccaaagaccaactcttacctagagatcataccatgaactcaaatcctggtggccagccaaggcttaatccagggactgggttaaagtctaaaccctga

SEQ ID NO: 616 - protein, 190 aa, Arabidopsis thaliana
MDENNAAKLTGIRQIVRLKEILQKWQTVTIGPKSEVPPLAAGKQAVAMISPAINKRLLDVKNGDSDEETCQSPEPPHDVPKGNLAVYVGPELRRFIIPTSYLSHSLFKVLLEKAEEEFGFDQSGALTIPCEVETFKYLLKCMENNLKDLHPDDNSGKPPKDQLLPRDHTMNSNPGGQPRLNPGTGLKSKP

SEQ ID NO: 617 - DNA, 384 bp, Arabidopsis thaliana
atggcgaaaggaggaaacaaactgatgaagctgaaatcagttttgaagaaactcaattcattcaacaccaagcctaaccagccaccagctcaaaccaatcacagccgatcctccgccgtgagtgcgttcccctctgaagaccttcaaactgtctacgtaggccgaacacggaggacataccacgtgagctccgatgtcgtgagccacccgctcttccagcagctagcggcggtggatggtggatgcggcagcgaggacggttccatctctgtgtcgtgcgaagttgtcttgtttgagcatttgctttggatgttggagaacgccgacgccgatgagtcacgccccgagtcggtctacgaacttgtcgagttctacgcttgttaa

SEQ ID NO: 618 - protein, 127 aa, Arabidopsis thaliana
MAKGGNKLMKLKSVLKKLNSFNTKPNQPPAQTNHSRSSAVSAFPSEDLQTVYVGRTRRTYHVSSDVVSHPLFQQLAAVDGGCGSEDGSISVSCEVVLFEHLLWMLENADADESRPESVYELVEFYAC

SEQ ID NO: 619 - DNA, 360 bp, Arabidopsis thaliana
atggccaaagttgggaagctgacaaagcttaagtcggctatgaagaaatggccttctttcgccaagaaccaccaccactcaacctcctcagccgctgtttccgacgaactctcagaagacaacaatctccatgtggtttacgttggtcaaactcgaagaccttacatgcttagaccagacatcatctctcacccactctttcaagaactcgtggatcggtcttcttctagatccatcgaacaagatcgtgagattgttgtagcttgtgaagtcgttttgttcgagcacttgctgtggatgctcaagtctggtcaagaaggaggatccgttgaagaattggctgagttctatacttattga

SEQ ID NO: 620 - protein, 119 aa, Arabidopsis thaliana
MAKVGKLTKLKSAMKKWPSFAKNHHHSTSSAAVSDELSEDNNLHVVYVGQTRRPYMLRPDIISHPLFQELVDRSSSRSIEQDREIVVACEVVLFEHLLWMLKSGQEGGSVEELAEFYTY

SEQ ID NO: 621 - DNA, 372 bp, Arabidopsis thaliana
atgaagaaactaaattctaaagggattagactctccgaattgatggagaaatggagaagaaggaagaaagggcacttcgctgtgtacacgaacgaagggaagagattcgttttaccattggattatctgaatcatccgatgttacaggtgctattgcaaatggctgaggatgagtttgggactaccattgatggtcctttaaaagttccttgcgatggaagtttaatggatcacatcatcatgcttgtgagaaggagcatgtcccatgattatgatgatgtggagaagtcttccacgagcagcacctgcaagggagcttcaatctcttctctctttcgtggacagagccagcttcagtcattagtttcctaa

SEQ ID NO: 622 - protein, 123 aa, Arabidopsis thaliana
MKKLNSKGIRLSELMEKWRRRKKGHFAVYTNEGKRFVLPLDYLNHPMLQVLLQMAEDEFGTTIDGPLKVPCDGSLMDHIIMLVRRSMSHDYDDVEKSSTSSTCKGASISSLFRGQSQLQSLVS

SEQ ID NO: 623 - DNA, 405 bp, Arabidopsis thaliana
atgaagcctctgattcgacgtctgtcacgaatcgcagactcatcctcctgcaaccgaaatcgcagcggcgatatccatcacccgacgtcaacgtactcctcttcagttttcttggtcaagcgagcaaccgtcgcgtcgagtgttccttccggtcacgttcccgtcaacgtaggcgaagataaggagaggttcgtggtgagtgcagagctgctgaatcatcctgttttcgttggattgctgaatcgatcagctcaagaatacggatacactcagaaaggagttcttcatattccttgtaacgtattcgtgttcgagcaggttgtagagtctctccgatctggcatcgctgatgatacatcggagctcattgcatcgttatctggtgaagatgtatctacagagtag

SEQ ID NO: 624 - protein, 134 aa, Arabidopsis thaliana
MKPLIRRLSRIADSSSCNRNRSGDIHHPTSTYSSSVFLVKRATVASSVPSGHVPVNVGEDKERFVVSAELLNHPVFVGLLNRSAQEYGYTQKGVLHIPCNVFVFEQVVESLRSGIADDTSELIASLSGEDVSTE

SEQ ID NO: 625 - DNA, 354 bp, Arabidopsis thaliana
atggcgattataaaccggagcaagctgacacaaacgactatgataaagcaaatcttgaagaggtgttcaagtttgggaaagaaacagagcagtgagtataacgatacacatgaacatgatggagactctcttcctctggatgttcccaaaggtcacttcgtggtctacgtaggagggaatcgggtcaggtacgtcttacccatttcgtttttgacccgacccgagtttcagcttcttctacaacaagctgaggaagagtttggcttcgatcacaacatgggtctcactatcccttgtgaggaagtagctttcaaatctctcatcacctctatgcttcagccaacatatatttag

SEQ ID NO: 626 - protein, 117 aa, Arabidopsis thaliana
MAIINRSKLTQTTMIKQILKRCSSLGKKQSSEYNDTHEHDGDSLPLDVPKGHFVVYVGGNRVRYVLPISFLTRPEFQLLLQQAEEEFGFDHNMGLTIPCEEVAFKSLITSMLQPTYI

SEQ ID NO: 627 - DNA, 333 bp, Arabidopsis thaliana
atgaaacaactaatccgccgtttatcgcgtgtcgcggactcaacacagtatagcctcctccggtctgaatcccagcgtggccgcaccaagaaggagaaacacaaatcttgggttcccgaggggcacgtgcctgtttacgtaggccacgagatggagcggttcgtggtgaatgcggagctgctcaaccaccccgttttcgtagcgttgctgaagcagtcggctcaagagtatggatacgagcaacaaggagtgcttcgcatcccttgccacgtgcttgtgttcgaacgcatcttggagtctctccgtctcggactcgccgatcgagtcacatga

SEQ ID NO: 628 - protein, 110 aa, Arabidopsis thaliana
MKQLIRRLSRVADSTQYSLLRSESQRGRTKKEKHKSWVPEGHVPVYVGHEMERFVVNAELLNHPVFVALLKQSAQEYGYEQQGVLRIPCHVLVFERILESLRLGLADRVT

SEQ ID NO: 629 - DNA, 315 bp, Arabidopsis thaliana
atggcggttaagagatcttcaaagctaacacaaaccgcaatgctgaagcaaatcctcaagagatgctcgagcttggccaagaatcaatgctatgatgaggatggtctgcctgtagacgtaccaaagggtcatttcccggtctatgtaggcgaaaagaggagccggtacatcgtacccatatccttcttgactcatcctaagttcaagagcttgcttcaacaggcagaagaagagttcgggttcaatcatgacatgggactcactattccttgtgaagaagttgttttccgctctttaacatccatgatcggatga

SEQ ID NO: 630 - protein, 104 aa, Arabidopsis thaliana
MAVKRSSKLTQTAMLKQILKRCSSLAKNQCYDEDGLPVDVPKGHFPVYVGEKRSRYIVPISFLTHPKFKSLLQQAEEEFGFNHDMGLTIPCEEVVFRSLTSMIG

SEQ ID NO: 631 - DNA, 483 bp, Arabidopsis thaliana
atgaagaggctccgaggttttaagatcggacacagattcgtcaagatcttcaaatggataatccgaagtagaagaaaccaaaccgggaaacgccaatgcctgaccggaattctcaacccggttacaaaaatctactctttagcacggcggtgtctccgtcgtggagctaatagactgtgcggaggaatgaaaccgggtcagacccggcttggtaacgaaccgaagacgccgacagttccaagagggcatttagtggttcatgtcggtgaatccggtgaggatacgcgacgtgtggtggtcccggtgatttattttaaccatcctctgttcggagagttgttggaacaggcagagcgggtttacgggtttgaacaaccgggtcggattatgataccttgtcgggtttcggattttgagaaggttcagatgaggatcgctgcatgggaccactgccgacgaaagagcacttttaagattctctaa

SEQ ID NO: 632 - protein, 160 aa, Arabidopsis thaliana
MKRLRGFKIGHRFVKIFKWIIRSRRNQTGKRQCLTGILNPVTKIYSLARRCLRRGANRLCGGMKPGQTRLGNEPKTPTVPRGHLVVHVGESGEDTRRVVVPVIYFNHPLFGELLEQAERVYGFEQPGRIMIPCRVSDFEKVQMRIAAWDHCRRKSTFKIL

SEQ ID NO: 633 - DNA, 474 bp, Arabidopsis thaliana
atgaagagagtcagagggttcaaaattggacacagatttgtcaaaattttcaaatggataccaagaaacagatgcccgacccgaatcacaaacccggttaccggaatccggtcattagcacggtgtttaagccgtggagctaagagattgtgcggtggaagcaagaagaatccgggtcagaatcagatccggttgggtaaggatccgaaaaagtcgaaccgggttgttcctcgaggacatttggtggttcatgtcggcgaatcagacgatgacacgcggcgagttgtggtgccggtgatttactttaatcatccattgtttggagaattgttggagcaagcggagcgggttcatgggtttgatcaaccgggtcggatcactattccttgtcgggtttcggattttgaaaaagtccagttgaggatcgctgcatgggatcattgccgcaggaaaaattcttacaagattatataa

SEQ ID NO: 634 - protein, 157 aa, Arabidopsis thaliana
MKRVRGFKIGHRFVKIFKWIPRNRCPTRITNPVTGIRSLARCLSRGAKRLCGGSKKNPGQNQIRLGKDPKKSNRVVPRGHLVVHVGESDDDTRRVVVPVIYFNHPLFGELLEQAERVHGFDQPGRITIPCRVSDFEKVQLRIAAWDHCRRKNSYKII

SEQ ID NO: 635 - DNA, 453 bp, Arabidopsis thaliana
atggggaagaacaataagatcggaagcgttgttcggatccgtcagatgcttaaacaatggcagaaaaaagctcacatcggatctagcaacaacgatcctgtttccgatgtacctcctggtcacgttgctgtttccgtcggtgagaatcgtcggagatacgttgtccgtgctaagcatttgaaccatccgattttccgacggcttctagctgaggctgaggaagagtatggattcgctaacgttggtccgttagcgattccttgtgatgaatcgttgtttgaggatattattgcgattgtgactcggtgtgagtcgtcatcatcatctggacgaggtaatcctccggcggcgacgcttgaggatctccggaggtgtagtcatgttggattggcgaagaacaacgttgaatctcgtccgttacttcctgggattgctgaaaaatctgtgtgctaa

SEQ ID NO: 636 - protein, 150 aa, Arabidopsis thaliana
MGKNNKIGSVVRIRQMLKQWQKKAHIGSSNNDPVSDVPPGHVAVSVGENRRRYVVRAKHLNHPIFRRLLAEAEEEYGFANVGPLAIPCDESLFEDIIAIVTRCESSSSSGRGNPPAATLEDLRRCSHVGLAKNNVESRPLLPGIAEKSVC

SEQ ID NO: 637 - DNA, 324 bp, Arabidopsis thaliana
atggctataatgaagaaaacttcaaaactcactcaaacagcaatgctgaagcagattctgaagagatgctcgagcttagggaagaagaatggaggagggtacgatgaagattgccttccgcttgacgtaccaaagggacacttccctgtctatgtcggagagaacagaagcagatacattgtcccaatctccttcttgacacatcctgagttccaatctctcttacaacgagccgaggaagaatttggattcgatcacgacatgggtctcaccattccttgtgatgaactcgtttttcaaaccctaacatccatgatccgatga

SEQ ID NO: 638 - protein, 107 aa, Arabidopsis thaliana
MAIMKKTSKLTQTAMLKQILKRCSSLGKKNGGGYDEDCLPLDVPKGHFPVYVGENRSRYIVPISFLTHPEFQSLLQRAEEEFGFDHDMGLTIPCDELVFQTLTSMIR

SEQ ID NO: 639 - DNA, 300 bp, Arabidopsis thaliana
atggcgatcagaatccctcgtgtgctgcaatcatcgaagcagattctccgacaagccaaactgttgtcatcatcttcttcttctagctctcttgatgttcccaaaggctacttagcggtttacgtaggagaacaaaatatgaagagatttgtagttccggtttcgtacttggaccagccttcatttcaagatctattaagaaaggcagaggaagagtttggatttgatcatccaatgggtggcctcacaatcccttgcagtgaagaaatttttattgatcttgcttctcgcttcaactga

SEQ ID NO: 640 - protein, 99 aa, Arabidopsis thaliana
MAIRIPRVLQSSKQILRQAKLLSSSSSSSSLDVPKGYLAVYVGEQNMKRFVVPVSYLDQPSFQDLLRKAEEEFGFDHPMGGLTIPCSEEIFIDLASRFN

SEQ ID NO: 641 - DNA, 270 bp, Arabidopsis thaliana
atggcttttttgaggagtttcttgggtgctaagcaaattattcgaagggaatcatcgtcgacaccaagaggattcatggcggtctatgtaggagagaatgatcagaagaagaagagatatgtggtgccggtttcatacttaaaccagcctttgtttcaacaactgttgagtaaatctgaggaagagtttggttatgatcatccaatgggcggcttaacaataccatgtcatgaatctttgttcttcacagtcacatctcagatacaatga

SEQ ID NO: 642 - protein, 89 aa, Arabidopsis thaliana
MAFLRSFLGAKQIIRRESSSTPRGFMAVYVGENDQKKKRYVVPVSYLNQPLFQQLLSKSEEEFGYDHPMGGLTIPCHESLFFTVTSQIQ

SEQ ID NO: 643 - DNA, 318 bp, Arabidopsis thaliana
atggcggtaaagagatcttctaagctaacacaaacagcaatgctaaagcaaatcctcaagagatgctcgagcttaggcaagaaacaatgctacgacgaggaaggtctccctcttgacgtaccaaagggacattttccggtttacgtaggcgaaaagcgtacaaggtacatcgtaccaatctccttcttgactcatcctgaattcctgatccttcttcaacaagcagaggaagagttcggctttcgtcatgacatgggaggactcaccatcccttgtgaagaagttgtttttctctctctaacatccatgatcagatga

SEQ ID NO: 644 - protein, 105 aa, Arabidopsis thaliana
MAVKRSSKLTQTAMLKQILKRCSSLGKKQCYDEEGLPLDVPKGHFPVYVGEKRTRYIVPISFLTHPEFLILLQQAEEEFGFRHDMGGLTIPCEEVVFLSLTSMIR

SEQ ID NO: 645 - DNA, 300 bp, Arabidopsis thaliana
atgggagtagaaaggggaagtggtaagggtctgaagcagatgttaaagagatgttcgagtttagggaagaagagcagcgtcgacgttaacttcaacggcgtccccaaaggtcacttcgtcgtctacgttggtcactctagatcccgacatgtcatccccatctccttcctcacgcaccccatcttccagatgttgctgcaacagtctgaggaagagtttgggttctttcaagacaatggcctaaccatcccttgtgatgaacacttctttcgagctctcatttcctccattaatccttaa

SEQ ID NO: 646 - protein, 99 aa, Arabidopsis thaliana
MGVERGSGKGLKQMLKRCSSLGKKSSVDVNFNGVPKGHFVVYVGHSRSRHVIPISFLTHPIFQMLLQQSEEEFGFFQDNGLTIPCDEHFFRALISSINP

SEQ ID NO: 647 - DNA, 273 bp, Arabidopsis thaliana
atggctttcgtgagaagtctattgggagcaaagaagattctaagccgctccaccggagcaggatctgcggcaccaaaagggtttcttgcggtgtacgtaggagagagccagaagaagagatatttggtgcctgtctcatatttaaaccagccttcatttcaagctcttctcagtaaatccgaagaagagtttggatttgatcatccgatgggaggcttaacgatcccttgtcccgaagataccttcatcaatgtgacttctcggctccaatga

SEQ ID NO: 648 - protein, 90 aa, Arabidopsis thaliana
MAFVRSLLGAKKILSRSTGAGSAAPKGFLAVYVGESQKKRYLVPVSYLNQPSFQALLSKSEEEFGFDHPMGGLTIPCPEDTFINVTSRLQ

SEQ ID NO: 649 - DNA, 447 bp, Arabidopsis thaliana
atggctggaggtatcggaaaatgtagcaagatccgacacattgtgaagctaaggcaaatgcttcggcaatggcgtaacaaggcgcgaatgtcgtctgtcagacgatctgtgccgtcagatgtaccgtcaggacacgtggcggtttacgttgggagaagttgcaggagattcgtggtgcttgcgacgtatctgaaccaccccattcttatgaatctcttggttaaggctgaagaggagttcggttttgctaaccagggaccgttggttatcccgtgtgaagaatcggttttcgaggaatcgattcggtttataactcggtcaagtcggtttacttgtaccgatgatttaaagaagaatcgccacggtggtattaggagcaagctggatctattgatggaatctcggccgttgcttcacggcgtctccgagaaggctatcatctggtga

SEQ ID NO: 650 - protein, 148 aa, Arabidopsis thaliana
MAGGIGKCSKIRHIVKLRQMLRQWRNKARMSSVRRSVPSDVPSGHVAVYVGRSCRRFVVLATYLNHPILMNLLVKAEEEFGFANQGPLVIPCEESVFEESIRFITRSSRFTCTDDLKKNRHGGIRSKLDLLMESRPLLHGVSEKAIIW

SEQ ID NO: 651 - DNA, 375 bp, Arabidopsis thaliana
atgacgaggcaaagaatgattacaattgagtcgccgaagaagaaaatgggtggaattgtgaagctcaagaatgttgtagagaggctggtgcaaatcaaaggcttttcctcggccaagaaaccgtgtcctgaagaatacggccgagattgtgtcccaaaagacgtaaaggaaggtcacttcgcggtgatagctgttgatgggtatcatgagcctacacaaagatttgttgtcccattgatgtttctagaacaccctatgttccgtaagcttctagaacaagcagaggaggaatacgggttctatcacgatggagcgctaatggtaccttgccggccaagccacctacggatgatattgaccgagcaatggtgttag

SEQ ID NO: 652 - protein, 124 aa, Arabidopsis thaliana
MTRQRMITIESPKKKMGGIVKLKNVVERLVQIKGFSSAKKPCPEEYGRDCVPKDVKEGHFAVIAVDGYHEPTQRFVVPLMFLEHPMFRKLLEQAEEEYGFYHDGALMVPCRPSHLRMILTEQWC

SEQ ID NO: 653 - DNA, 420 bp, Arabidopsis thaliana
atgataaagaagatgaggttgatgatgatgctcaggagatgcaagagcgtgtccacacaattaggtcgttcatattcttacacaagtctcagatccaaatcggccaggagagatccacaagaccatctccaagacgttgaccagagtcctacaccgtctatgtaccagacagtgttggttggacgtacgaagaaaccttacttgatcagtaagaaacacttgaagcaccctctgcttaacgctcttgtagagaagcaacagagatacgaagaagacgataatgaagatggaagttgtataattacggtgaaatgtgaggttgttttgtttgaccatcttctgtggatgctcgaatacggtgacgaagttcacatattagagtctctagatgactttgctcatctctatctctccccttga

SEQ ID NO: 654 - protein, 139 aa, Arabidopsis thaliana
MIKKMRLMMMLRRCKSVSTQLGRSYSYTSLRSKSARRDPQDHLQDVDQSPTPSMYQTVLVGRTKKPYLISKKHLKHPLLNALVEKQQRYEEDDNEDGSCIITVKCEVVLFDHLLWMLEYGDEVHILESLDDFAHLYLSP

SEQ ID NO: 655 - DNA, 396 bp, Arabidopsis thaliana
atgacagagcagaacgatacagctggacaaaaccatgtcaaactctctgcccctacgcttttagaccacaaaacaaaacaccattgtcatatcatcaataaccagcaatcaaataactcatatatgcttcaaaccaagactttcaagattcaaatggctttggttagaggtatttatgcttcaaagaagacacttgaccgctctatagcagctgcagcagcaacattgagcaaaagacatgtgggttctgcgctagcctttgtcctagcttcttacttgaaccagcctttgtttcaagctcttctcagtaaatccgaagaggagttagggtttgattatccgatggttggcctgacgattcgttgcccaggagataactttctcactatactgtaa

SEQ ID NO: 656 - protein, 131 aa, Arabidopsis thaliana
MTEQNDTAGQNHVKLSAPTLLDHKTKHHCHIINNQQSNNSYMLQTKTFKIQMALVRGIYASKKTLDRSIAAAAATLSKRHVGSALAFVLASYLNQPLFQALLSKSEEELGFDYPMVGLTIRCPGDNFLTIL

SEQ ID NO: 657 - DNA, 396 bp, Arabidopsis thaliana
atggctatattcggtaaactgacaaagctcaagtctgccataaagaaatggccttccttgaccaagaaccaccattcaaccatgtgtaccgcctctaccgccgtatctgaggtctcaaagtgcgaggatctccatgtggtttacgtcggaaagtcacgaagaccttacatgcttagttcccacgtcatcgctcatccgcttttccaagaactacttgaccggtcgtctagatttatcgaagaacgtcacgaccaagagaccgtcttagtagcttgcgaagtcgtattgttcgagcacttgttatggatgctcaaaaacagttcctctgatcacggcgatgaggatgatcgcgaaagaggatccgtcgaggagttggctgagttctatacttattga

SEQ ID NO: 658 - protein, 131 aa, Arabidopsis thaliana
MAIFGKLTKLKSAIKKWPSLTKNHHSTMCTASTAVSEVSKCEDLHVVYVGKSRRPYMLSSHVIAHPLFQELLDRSSRFIEERHDQETVLVACEVVLFEHLLWMLKNSSSDHGDEDDRERGSVEELAEFYTY

SEQ ID NO: 659 - DNA, 573 bp, Arabidopsis thaliana; identical to SEQ ID NO: 615

SEQ ID NO: 660 - protein, 190 aa, Arabidopsis thaliana; identical to SEQ ID NO: 616

SEQ ID NO: 661 - DNA, 270 bp, Arabidopsis thaliana
atgggagtgttccgaggtcttatgggcgcaaagaagatctttcaaggtcgatcaatggcagcttcgacaccaaaagggtttcttgcagtgtacgttggagaaagccagatgaaaagatacatagtgccagtctcatatttgaaccagccttcatttcaagctttgttgagtaaatctgaacaagagtttgggtttgatcatccaatgggcggcttgaccatcccttgccctgtagatacatttatcaccgtcacttctcagcttcattag

SEQ ID NO: 662 - protein, 89 aa, Arabidopsis thaliana
MGVFRGLMGAKKIFQGRSMAASTPKGFLAVYVGESQMKRYIVPVSYLNQPSFQALLSKSEQEFGFDHPMGGLTIPCPVDTFITVTSQLH

SEQ ID NO: 663 - DNA, 1137 bp, Aquilegia formosa
ttttacaatcatccataatttctatttctgcatatataagaaacttccttgcgcaactaaccaagccatcaaaatcatggctcaacttgcaatgttgatgagaatgcagcaagtttttaagtactaattcagcacacattgtaattgattaaactctttaagccttcttcttcttctttttttcttttttttttcaaatgtggacttaataatgaagaattctaagaaggatcacatggctttgccttgaaggatcacacggctttgcctcttgaaggatcacatggctttgccttgcaactaactaattatcaagattagtcactcgtgatgaaagaataactcaagtagcatttcctctataaatatacacctccatcagctcaaactattatccaactccaagttaaccagttttctctcaactccaacacatcagttttttcttaatatacttgcagcatccatggctattcgtttacctggtattcctcacattaaaagaagtcttcgacgatctttttcaaatacggaaacttcaactgtagtcccaaaaggccacattgcagtatatgttggagaaaatgaaaagagaagatttgtggttccaatatcatacctgactcatcctttattccaagacttgttaaatcaagctgaggaaggatttggatttaatcacccaatgggagggcaaactatcccatgccacgaagattcctttatagagctaactagtcagttgattggctcataattaagatgatgagcagatcccgcaggttgcagcagtatggttcctttggaggctggtccctgctattcctcatatgaaaagaagctcccttcgacggtctctttcaaatacagaggagactgcaagtgttccaaaaggccatattgctgtttatgttggagagaatcaaaagaagcgatttgtggttccaatatcttatgtgaaccatcctttattccaagacttgttaaatcaagccgaggaagagtttggatttgatcacccaatgggcggcctcacaattccatgcaatgaagactcttttcttcaactaactggccagttgatggccttcagataattgttagattctgcaccaatatggctccatggggctggtc

SEQ ID NO: 664 - protein, 179 aa, Aquilegia formosa
MRRRNRGFKLGRKLVKVCKWIFRSKKRSNGYQRLDTTTSCQDYKTKTMTKIYSWGQSLKRGAMKLSSSCSSRSITFFSTDYSRMDREPFEPKPIEVPKGHLAVYVGQKDDDPHRVLVPIIYFNHPLFGELLKEAEREYGYNHPGGITIPCPISEFEKVKTRIAAGKKSTSSTSTRKHRD

SEQ ID NO: 665 - DNA, 1214 bp, Aquilegia formosa
ttcgcgtgccgttgccgaccatctaaatttctcattctctatctctctatatgtcaaatcgcttttcataccttatatataaaacgctctcagataccccaatagaaagaaaaactgattgcttctgcttttcaattgataaacttcaccaaagaaaaagacaagttggtgattcaagaaaaagagagaatcagaagagataagaaagaagctagctagctagtacttcgatttgattgaaatagctagctcagattctctctctctaatgaagtctttcttttattccaatttatttggaaactattatgtctaatataccattttctttatctgaaagttgtttttctttgttttgtttaaccatgtctgttgctgacccttggccattttctttcttttgataaaatccctcaaaaactctacttcttccttaatttccatcattcactatatctcttcttattttattcttagtagttttcttcatttcttttgtaaaaaaaaatgaggagaagaaacagaggttttaaattggggagaaagcttgtaaaggtatgcaaatggatattcagatctaaaaaaagatccaatggataccaaagattagatactacaacttcttgtcaagattataaaaccaagacgatgacgaaaatttacagttggggacaatcattgaaacgtggagctatgaagctttcttcttcttgttcatcaagatcaattacttttttctctacagattatagtcgaatggatcgagaaccatttgaaccgaaaccaattgaagtaccaaaagggcatttagcagtttatgtgggtcaaaaagatgatgacccgcaccgagttttagtacccattatttatttcaatcatccattatttggtgaacttttgaaagaagctgaaagagaatatgggtataatcatccgggtggtattacgataccatgcccgatttcggagtttgaaaaggtgaagacgagaattgcagcaggaaagaaatcaacgtcgtcgacgagtacgcgaaaacatcgagattgatgatgttgatgagcgtgtggttgatacttgataattttaggagtaggagaattctgatcccatggtggtgggttggatggaattcatactttcatagtgggtccccatttagtttttcttctttttcttgaaagtagtctttgttttgtgaatagttgatgtaatag

SEQ ID NO: 666 - protein, 96 aa, Aquilegia formosa
MAIRLPGIPHIKRSLRRSFSNTETSTVVPKGHIAVYVGENEKRRFVVPISYLTHPLFQDLLNQAEEGFGFNHPMGGQTIPCHEDSFIELTSQLIGS

SEQ ID NO: 667 - DNA, 450 bp, Arachis hypogaea
  misc_feature (55)..(55): n is a, c, g, or t
  misc_feature (57)..(57): n is a, c, g, or t
  misc_feature (259)..(260): n is a, c, g, or t
  misc_feature (265)..(266): n is a, c, g, or t
  misc_feature (391)..(391): n is a, c, g, or t
acatcctaaagcataagaaactaaaatacttgcatcttatttacaagtcatttgngnaaactagtctttcttcaacacatacaaaaatgggttttcgtttatccggcatcgtaagaaaggcatcatttacttcatcttcaaaagctgtggaagtgccaaagggttatcttgcagtttacgttggagataaaatgaagcggtttgtgatccctatatcatacttgaaccagccttcatttcaagatttgctaagtcaagnnggggnngaatttgggtatgatcatccaatgggtggtctcacaattccttgtgaagaaaatgtattcttagatatcacttctcgcttgagttgatgctaggcaccatcaagattaggctgacttagaaatanattaacacaatttttgtagcaatttcttaccctgagaaagattttctccattttttgta

SEQ ID NO: 668 - protein, 99 aa, Arachis hypogaea
MALRKSTRLHQAPLLKQILKRCSSLGKKQGFDNDVPKGHFVVYVGENRSRYIVPISILRCPSFQTLLHQAEEEFGFDHEGGLTIPCHEDVFESLVTSSI

SEQ ID NO: 669 - DNA, 460 bp, Arachis hypogaea
  misc_feature (28)..(28): n is a, c, g, or t
  misc_feature (83)..(83): n is a, c, g, or t
  misc_feature (94)..(94): n is a, c, g, or t
  misc_feature (135)..(135): n is a, c, g, or t
  misc_feature (143)..(143): n is a, c, g, or t
  misc_feature (147)..(147): n is a, c, g, or t
  misc_feature (216)..(216): n is a, c, g, or t
  misc_feature (424)..(424): n is a, c, g, or t
  misc_feature (434)..(434): n is a, c, g, or t
  misc_feature (436)..(436): n is a, c, g, or t
  misc_feature (438)..(438): n is a, c, g, or t
  misc_feature (441)..(441): n is a, c, g, or t
  misc_feature (454)..(454): n is a, c, g, or t
ctctaatttctttctctcataccacaanaacacgtcccagctcccaaactcaaattcacttgaaattcaaattcaaatgtcgncgaaatgcggnaagattcgccacattgtgaggcttcgtcagatgctgcgtcnctggcgcntcanggcgcgcatgtcctccgctgctaataaccgctcaagctcttctccgccgtctgatgttcccgctggacncgtggcggtctgcgtcggcatcaactgcaccagattcgttgtgcgagctactcacctcaaccaccctgtgttccagaagcttctagttcaggcggaagaagagtacggcttcgccaaccacggtcctttggctattccctgcgacgaagcactctttgaagatgttatccggttcatttcccgctctgagtctggatccggttcgaancgattcttgnancntgnatgactctcaaanaccctg

SEQ ID NO: 670 - protein, 102 aa, Arachis hypogaea
MGARMWTVIRVITTIMMMISIRLPFEKKKLMVPKGYFAVYVGEVEKKRFVIPLSFLNQPSFQQLLSMAEEEFGFTHPMGGLTIPCTQDTFIHLTSLLHAQTQ

SEQ ID NO: 671 - DNA, 671 bp, Antirrhinum majus
agaatccatgtgattcctcatgtgcttatgttcttcaaagttcaccagccaatcacatatccatctgaacattgaccactcaatctgaattttgaaggaaaaatcatttccaagttcacttatatatattcaacacatttccagcttttccaaacagcaacaagtcttcaagaaaatgttctctctcagatttcattagcttcataaaatttcctttaatctctccttctgagccttccattaaatttgtcaatggccattaccagaattcttagacgatctttatctggcggaaatagatcaaactcatcaggagctgatgtccctaaagggcattttgctgtatatgttggagaaagtgagaagaagcggtttatcgttccgttatcatacttgaacaaccccacatttcaagaattgctatgccaagctgaagaagaatttggattccaacatccaatgggtgggcttaccattccttgcagtgaagatttattcgtcaatctcatttctcacagaaaatgatggataccaagttttagggagcaaattttgtagattagttacacattttttttcttctttttttcttatttcattatcataggaaaacttgtattcctgaacaaaattacagaatgaatacatgatacagtagccatttggaacac

SEQ ID NO: 672 - protein, 90 aa, Antirrhinum majus
MAITRILRRSLSGGNRSNSSGADVPKGHFAVYVGESEKKRFIVPLSYLNNPTFQELLCQAEEEFGFQHPMGGLTIPCSEDLFVNLISHRK

SEQ ID NO: 673 - DNA, 470 bp, Antirrhinum majus
ttcacattatactttcagcaagatttacttaaatacaaaaatggctattcaccaaatgcttagacggtctttatcagccggaagaagatcatcttcgccaagaactgatgttccaaaagggcattttgccgtttatgtttgcgagagtgagaaaaaacgctttgttattccagtgtcgtatttgaatgacccttcattccaagatttgctatgtcaagcggaagaagaatttgggttccatcacccaatgggtggccttaccattccctgcagtgaagaattattcatcaatatcacttcgagcttgagcagaagacaatattagacatataatgagattttgagaggcatagtttttgtagactagtatacgaaagatagtttttttcttttttacatggattttgttaggaaaaattgtatccctgaacaaagttacagatgaatacaaaaatactcatttgaactgc

SEQ ID NO: 674 - protein, 94 aa, Antirrhinum majus
MAIHQMLRRSLSAGRRSSSPRTDVPKGHFAVYVCESEKKRFVIPVSYLNDPSFQDLLCQAEEEFGFHHPMGGLTIPCSEELFINITSSLSRRQY

SEQ ID NO: 675 - DNA, 468 bp, Antirrhinum majus
cttcaataaacaacttccattttctctcctaacatcctttgatctcacaggatccaatattatctatatcaatggcgattcccaagattctacgacgttctttgtcagctggaaaaagatcatcttcaacaggaactgatattccaaaggggcatcttgcagtttatgttggagaaagtgagaagaagcgctttgttattccgttatcgtacttgaacaagcccatgtttcaagatctgctatgtcaagccgaagaagaattcgggttccatcatccgatgggtggcctcaccattccatgcagtgaagatttattcattgacataacctctcacttggccagaagatgatttatagctaggtctttaggacagatttgtagactagtttttttctttctttctctgtctgagaaaattatatccttggacaaatttacagaatgaatacataaaaatagacattttc

SEQ ID NO: 676 - protein, 92 aa, Antirrhinum majus
MAIPKILRRSLSAGKRSSSTGTDIPKGHLAVYVGESEKKRFVIPLSYLNKPMFQDLLCQAEEEFGFHHPMGGLTIPCSEDLFIDITSHLARR

SEQ ID NO: 677 - DNA, 468 bp, Antirrhinum majus
ttttaacttccggttctctgagaatttcataaatactaagatggcgatccaccgtgtagttagacggtctttatcgggtggaaaaagatcatctttgacaagaactaatgtcccaaaagggcattttgttgtttatcttggagagtacgaaaggaagcgctttgttgttccgctatcatacttaaacgaccccgagttccaagaattgctaagtcaagctgaagatgaatttggattcgatcatccaatgggtggcctaacaattccttgcagtgaggatttatttattgatctaatttctcgcttgggctgaagatgatacatagacactagatattatatttataggaacacacagttttgtaaattagttttgtgaaatagtttttctttattactttatcctgtttgtggaaataatgtgtccacaacaattacagaatgataaatagaaaacaaacctttttc

SEQ ID NO: 678 - protein, 90 aa, Antirrhinum majus
MAIHRVVRRSLSGGKRSSLTRTNVPKGHFVVYLGEYERKRFVVPLSYLNDPEFQELLSQAEDEFGFDHPMGGLTIPCSEDLFIDLISRLG

SEQ ID NO: 679 - DNA, 1189 bp, Arachis stenosperma
caataagcagccatgtctaacaacgccccaagttctctaagattctcatctctaagccgcctcaacaagaattgccttgttttcttgtgagtttcttcagagagagaaagacagaggaagagagagaaagagaaagagagaagtaaattccgagacatacacacatacccacatagaaagtttgaatctttttggtgtgtttttgtttgtgtgtttttttgcagagatgggtcatggagaaaagatcagtccaaggagcttccatttgcatcgccacctcctccaacatggtgagaagaacaacaacaacatcaacaacagtagcaacaaagtgtttaaggatgttattccaaaagggtttatggcaataaaggtaggtcaaggtgaagaacaacaaaggtttgttgttcctgttatatacttcaaccacccactcttcatgcaattattgaaggaagctgaagaagagtatggttttgatcagaaaggaaccataactataccttgccatgttgaagaattcaggaacgttagcggcttgattgatagggaaaagagtttccataatcatcatcatcatcaccatgttggttgctttggtttttagtttgatgatgatggaaattaaagaagggaaaaaaaaaaggcctgaaaataatagaataaatatcatcatgaccaaaaatcatggcttcttttcataatgatttggtcatgtaaatgactagtttaatttaggttttttttttaatataattttttgggttttttttttttttttgcctatgtttatttaggtatagatagagtgggatgaggaaaaattcccctactgttgaatcatctcacttatacaaatttacgaatgaaaaaaccccaccctaaagtaaatcaactaatagatctgctactttgttttatattatgtttagtaacattaatatattacctcctgccttccaaccgcgtgcggctattatttttttttataacttgtctttgtttttcttatcatatttttcactttatctagaaacataccatcactaaacacaccgttctttgtattaaatcaatactgtcattcttactgtaccctaattatcttatatactctagtacatgtgactgtaacatatactaatatactaatcctagccctgccaccgtaagtaaaaactccttcata

SEQ ID NO: 680 - protein, 126 aa, Arachis stenosperma
MGHGEKISPRSFHLHRHLLQHGEKNNNNINNSSNKVFKDVIPKGFMAIKVGQGEEQQRFVVPVIYFNHPLFMQLLKEAEEEYGFDQKGTITIPCHVEEFRNVSGLIDREKSFHNHHHHHHVGCFGF

SEQ ID NO: 681 - DNA, 872 bp, Arachis stenosperma
  misc_feature (1)..(1): n is a, c, g, or t
  misc_feature (817)..(817): n is a, c, g, or t
nggggatcggccttacggccggggggcgtttctcaataagcagccatgtctaacaacgccccaagttctctaagattctcatctctaagccgcctcaacaagaattgccttgttttcttgtgagtttcttcagagagagaaagacagaggaagagagagaaagagaaagagagaagtaaattccgagacatacacacatacccacatagaaagtttgaatctttttggtgtgtttttgtttgtgtgtttttttgcagagatgggtcatggagaaaagatcagtccaaggagcttccatttgcatcgccacctcctccaacatggtgagaagaacaacaacaacatcaacaacagtagcaacaaagtgtttaaggatgttattccaaaagggtttatggcaataaaggtaggtcaaggtgaagaacaacaaaggtttgttgttcctgttatatacttcaaccacccactcttcatgcaattattgaaggaagctgaagaagagtatggttttgatcagaaaggaaccataactataccttgccatgttgaagaattcaggaacgttagcggcttgattgatagggaaaagagtttccataatcatcatcatcatcaccatgttggttgctttggtttttagtttgatgatgatggaaattaaagaagggaaaaaaaaaaggcctgaaaataatagaataaatatcatcatgaccaaaaatcatggcttcttttcataatgatttggtcatgtaaatgactagtttaatttaggtttttttttaatataattttttggtttttttttttttttttgccnatggttatttaggtatagatagagggggagaggaagacttaccgaatggtggttc

SEQ ID NO: 682 - protein, 87 aa, Arachis stenosperma
MMMMSIRLPFEKKKLMVPKGYFAVYVGEVEKKRFVIPLSFLNQPSFQQLLSMAEEEFGFTHPMGGLTIPCTQDTFIHLTSLLHAQTQ

SEQ ID NO: 683 - DNA, 886 bp, Arachis stenosperma
ccttcggccgggggatattcattgagatttcaaagagagaaagaaattaaagatggttgttcgtgtgattccagagacgatgatccaacatgcaaagcaaattctaagattgaggtctcatcatgcaaacaaaattgatgtgccaaaagggcactttgcagtgtatgtgggagatgaagataacaacatgaagcggtttgtggttcctatttccttcttgaagcagccaatgttccaagctttgttgaaacgtgctgaggatgaatttggctttgaccaaccaatgggaaatcagcatcttcttattccttgtcctgttgatcatttccttgatctcacttctcgaatcaccaacaactagcttacttaattaattagctatctacctaattattgtggttgattcactattaattagttattattcattcccacaactttgtatttcctatgtgcatacattaattaatattattgtattcaattttgagaaagagtgaatattacttttcttctttcctaagattaatattatttcttggtcggcccgccacggcccatgtcgacttctagactttagtcaaactttatttgatggcggcccgccaattctaagaccccacttgggcccaatatctcccctattaatgggagtcctaattttataatttccctgggcccacacgtatatataatcctatcgtgggactgggaaaaaaaccctggtgtggtttcctcaatctttattcccccttttgggtgtcaaatccctctcttttagtcctggtgtagggttaatattgttaaaaagaatcccgatacaggatcggcccctttgcctgacaaaggtaccctaattcctttaatggccaatatagaataaatg

SEQ ID NO: 684 - protein, 102 aa, Arachis stenosperma
MVVRVIPETMIQHAKQILRLRSHHANKIDVPKGHFAVYVGDEDNNMKRFVVPISFLKQPMFQALLKRAEDEFGFDQPMGNQHLLIPCPVDHFLDLTSRITNN

SEQ ID NO: 685 - DNA, 505 bp, Beta vulgaris
gttctcaccaccttcttacttcttacttctttcttctttctctcctctcctacttactacaactcgtactacttacatcaaaaacaacaacattactattattatttcttccatcctcaaaaaaaaatcaaaacattactattatttcttccattctaaaaaaacaacacaccaaaatgtcggctgcaggatcaacaagtagctactcaaaaggcaacaaaatccgccacattgttcgactccgccaaatgctacgccgctggagaaacaaagcagctcaacggcgcatcccctctgacgtcccagccggttacgtagccgtaacagtcggctccaactcacgccggttggttgtccgagccactttcttaaaccaccaggtttttaaaaatctcttggttcaagccgaataagaatacggctacaccaatcaagctggtcctctttttattccttgtgatgagaaagtcttcgaagatatcctccgctgttttaaccgctctga

SEQ ID NO: 686 - protein, 117 aa, Beta vulgaris
MKGKFFQASLNKCMKMGSRVIHSSECESCCQWCFWPSMSLQQETEIFIPKDVPKGHMVVYIGEHQKRYVIKITLLKHPLFRALLDQARDQHDDSTIPPRLWIPCDENVFLHVVRCAR

SEQ ID NO: 687 - DNA, 1251 bp, Beta vulgaris
gagggagaaaggaaaaacaaatcagccaaaaagaaagaaaaaaaaagatcttctattatctaaaagcttataatgaagggtaagttctttcaagcatccttgaacaagtgcatgaaaatgggaagcagggtgatacattcatcagaatgtgagtcttgctgccaatggtgcttttggccatccatgagtttacagcaagaaaccgaaatcttcatccccaaagatgtcccaaagggtcatatggtcgtgtatattggtgaacatcaaaagaggtatgtcatcaaaatcacattgcttaaacacccacttttcagagctctgttagaccaggctagggaccaacatgatgactccaccataccgccaaggctttggatcccttgtgacgaaaacgtcttcctccatgttgttcgatgtgcccgatagtcactgagcttctcatgcaagggaggggaggggtaggatcttaatttacaaccctcttctctatggacaaaaaaagaaagtatttgtgcatttggaatttttgaggcctttttcctgactgtgtgaaatgattttctttttaacatatttattaattaatttttgtcttctttctttgattttatattttttggttcccattttcttcttttttcttttgtttccttttttctttttattttttttatattttcttttggttcgtccctttcttttttcttttttcgtccttttttcttctacttccttttttttttctttatgtttgaaccccttcttctttcctcttttctctcttttatttattctccttttcatttgttcttttgtattctcttttctctttcttcttcctttttttatttcgttctttgattactttcttttcatttcttttactcttatattttcttactctctttttatcttttttatccttatcatttctttctcttctattctctctttatttgcgtcttttttacttttatatttttactttttctctcattctttctttcttactttatttttttccttttctacttctttctctctttatattcttctttttttcctctattttttcttttctctccttttttactttttcttctattatctacttctttttatctttattcttttctactttctttctcgtttttcttctttttattttttgttctatctttctttttatgttcttattccctttaatttttcttttctctttttctctttttatttttttacttgacttcg

SEQ ID NO: 688 - protein, 97 aa, Beta vulgaris
MGFRFYNVISNTKQMLKLHSSINRNQQKSVPKGHIAVYVGDDEKKRHVVPLSFINHPSFLDLLRRAEEEFEFNHPMGGLTIPCSEQIFNDLTARLSY

SEQ ID NO: 689 - DNA, 444 bp, Capsicum annuum
ggcacgagcccctctttgtgcacactgttctagaacacgaagctcaactcaaccagcgatggcttcctctaccatcaaaaaagtccacattattacccaaatcgtccgcctcaagcaagttgtcaagcgatggaaagacaactcccttcgttcccgctccgtgctctcttactcttcttctgattccgacgaacccggttctgccctacccaaccggcgttgtacaccttccggttctttggcggtctatgtaggcaatgagcgccgccggttcgtgataccgacccggtttttgaatctaccaatattcatttcgctacttgataaggcggaggaggagttcggctttcagcccaccggcgggttggttttgccttgtgaagttgagttcttttcggaaatcttgaggttgcttgaaattgatgaacagagattcggtgtttt

SEQ ID NO: 690 - protein, 83 aa, Capsicum annuum
MAILRMIKKSSTTRDVPKGHFAVYVGETQKRRFVVPISFLSEPLFQDLLSQAEEEFGFDHPMGGVTIPCSEDLFTDLTFRLRK

SEQ ID NO: 691 - DNA, 412 bp, Capsicum annuum
agtgatcctttctaacttcccaccatttcctcatatcaagaaccgaaaatgggtctaaagaaatcaaacaaacacattactcaaagtgtagccctcaaacaaatcttgaaaaggtgttcaagttttgggaaaaatgagaatggacttcctcatgatgtaccaaaaggccactttgtagtatatgttggtgaaaataggagtagatacataattccaatttcttggttgacacatcctgaatttcaaagtttgcttcaaagggctgaagaagaatttggattcaaccatgatatgggacttactatcccttgtgatgaagaggatttctgttctctaatgtcaatattccgataagaaaaatgttaggtaaaattgcatacaaaagacttaatgtgatccgaccattcatcga

SEQ ID NO: 692 - protein, 85 aa, Capsicum annuum
MAIRVPRIIKKSSTSLDVPKGHFAVYVGEKQKNRFVIPISYLSQPSFQDLLSRAEEEFGFDHPMGGVTIPCSEDIFIGITSKFRI

SEQ ID NO: 693 - DNA, 587 bp, Capsicum annuum
caaacttcaaagtattcaaagctttatctactttttgagtttctttataattcttcttcttgtcacatctatactaaaactaaaaaatcatggccattcttcgtatgatcaagaagtcttccacaactagagatgttcccaagggccattttgctgtgtatgttggggagacgcagaagaggagatttgtagtccccatatcattcttgagcgaacctttatttcaagacttgcttagtcaagctgaagaagaattcggcttcgaccatccaatgggtggtgtgactattccctgcagtgaggatttgttcactgatctcacttttcgattgaggaagtgagaaggaaactagtccccatttttacaattacacaactttggatagttgtcgtaattcgggatacccactgtgtacagtttagagatactagttagacttgggatccccactgtgtacagtttagagtttctagttagacttaggacacatttttctacttcaaaagaaattgaagtaatgaaacttttttacttccatcgtttctattccatacatgatgtagtcaattcattgcaacagaaattt

SEQ ID NO: 694 - protein, 101 aa, Capsicum annuum
MGLKKSNKHITQSVALKQILKRCSSFGKNENGLPHDVPKGHFVVYVGENRSRYIIPISWLTHPEFQSLLQRAEEEFGFNHDMGLTIPCDEEDFCSLMSIFR

SEQ ID NO: 695 - DNA, 696 bp, Cichorium endivia
gcgagatgatgatgcaataacatcgtctcatcggtaatcatcctggtggaggagttaatccagcattcagcatgaggttgaagggatacactgtttattccgattctgacattgaagactgttgtcagagccctgatccaccaaacgatgtgcccaaagggtatttagtggtctatgtaggccccgatcttcggaggttcatcattcccacaagctatcttagtgatccattgttcaaagttcttctcgaaaaagtcgaggaggagtttggatttgatcatagtggtggcctcacaatcccttgtgagattgagaccttcaaatacctcctcaattgcatggaacatcatcagaaagatcatcttgaagacaaccatgctaccatttgacgatcaaagacgaaacatcaactgtgtaagtaacgattgggtgcagcttattcttgtggtaaaaaaaccaaaaagaagtttctccagtatgaagatttgacattcttttatctgtatttttgctcttctctctttcaaatattcaaatgaaagagagtcgcagattagttcgtagaaaaacttgtgtttgtaggttaagtttgactttgtgtttgttcattttcttgtcattggatgtgtaatagtaatacatttttaaattcgtgacatgttcattattcaaccaaattgagtactcttttggcct

SEQ ID NO: 696 - protein, 101 aa, Cichorium endivia
MAIRMPRIIQAKKVLGRSLSNGSSSSSPPVDVIPKGHLAVYIGEQEKRRFVVPLSLLNQSSFQDLLRQAEEEFGYDHPMGGLTIPCREDIFIDVASRFCSL

SEQ ID NO: 697 - DNA, 963 bp, Cichorium endivia
tttttgtctcaaaacacatttttcttgaaaaaaccaaaggagcacagtcagcaatcagcatatatatcccttatttaatttattcttttaagctttactttactcccacggaaaaaggtttaattttgatgatgcataaaaaccgtaagtaggcgtgaagaaatgatgttagtccaagaaaggaggcaaagagtaactggcagagaataagaaaaaaacgtaaaacgattccacatttcagttcaatacccatcaaattccccttttgttcttgtgcactgaaccataatctggacatatacgcatcagatctctctgtttctacttattgataccccaattgaagaacaacaacaccgcgactctctgttgatcgtcctccttctcctccgaccggcgaccaccaccttcagcgaaggaagatctaggattacaactatggatgacaatttaggaaccagactgaacggcatacgacaaattgttaagattaaggaaatcattcaacgatggcagcatgtgacactcggggcaagggggaacgatgatgatgctgataacaatcgtccaatcggtaatcatcctggtggaggaattaatccagcaatcagcatgaggttgaagggatacactgtttattccgattctgacattgaagacggttgtcagagccctgatccaccaaacgatgtgcccaaagggtatttagcggtctatgtaggccccgagcttcgaaggttcatcattcccacaagctatcttagtgatccattgttcaaagttcttctcgaaaaagtcgaggaggagtttggatttgatcatagtggtggcctcacaatcccttgtgagattgagaccttcaaatacctcctcaattgcatggaacatcatcagaaagatcatcttgaagacaaccatgctaccatttgacgatcaaagacgaaaacatcactgtgtaagtaa

SEQ ID NO: 698 - protein, 105 aa, Cichorium endivia
MRLKGYTVYSDSDIEDCCQSPDPPNDVPKGYLVVYVGPDLRRFIIPTSYLSDPLFKVLLEKVEEEFGFDHSGGLTIPCEIETFKYLLNCMEHHQKDHLEDNHATI

SEQ ID NO: 699 - DNA, 579 bp, Cichorium endivia
cgggggacactcaacccaaatcctcccagcgtctttcgtctttcacacagaagaaaccttctcagattgcctttcttccaaaagaaattgattgtaaccttcacataaaaatggctattcgcatgcctcgcatcattcaggccaaaaaagttcttggtcgatcattgtcaaacggaagcagctcatcgtcaccacccgtagacgtcatccccaaaggacatcttgcagtatatatcggcgagcaagagaaaagacgatttgtcgttcctctctcgttactaaaccagtcttcattccaagacttgctacgacaagcagaggaagaatttggttatgaccatccaatgggcggcctcacaattccgtgtcgtgaggatatcttcattgatgtcgcttcacgcttttgttcattatgaaacatatgtgttcgcttacgtagaaagttttgtacagtagaaaacaccttagatatagtttttacacggagtaacggggtctccaatctgtatgatatcgagaattgatttaggcattaacatagcaatgaaaaatatatttcaacttttgattcgcaaaaaa

SEQ ID NO: 700 - protein, 137 aa, Cichorium endivia
MGSGDKHFLSFHLHLHHHHHHNHNQNQQPEESMKKDQNSIPKGCMAVMVGHEGEEQKRFIIPVIYIYHPLFMELLKEAEEEYGFDHRGPINIPCDVQQFCNVEGLIKKDDFFYNHQHHHHHHHHHHHHHHHIWCFKA

SEQ ID NO: 701 - DNA, 911 bp, Cichorium endivia
gggggctcttgatcacaaaaacaacaccaaaaaatatctcaaagtctttgacatatacatatatcatatatgctgccatgagcaacattccaagatctttaacagactcttgcttaaccagcttcttgcttgcgatttcctcttctgatccttggcctttctctattctttcctcctaacccctccttaattctctctttgatttgtttctgtaggtatagatcctgttgttaatttggttttgggaattttgatgggtagtggagataagcattttttaagttttcatctgcatctgcatcatcatcaccatcacaatcataatcagaatcagcagccggaggagtccatgaagaaagatcagaacagtataccaaagggatgtatggctgtaatggtggggcatgaaggagaagagcaaaagaggttcatcatacccgtaatctacatctaccatccgcttttcatggagcttttaaaggaggctgaggaagaatacggttttgatcaccgtggacccatcaacataccatgtgacgttcaacagttctgcaatgttgaagggctgatcaagaaagacgatttcttttacaaccaccaacatcaccaccatcatcaccaccaccaccaccaccatcaccaccatatctggtgcttcaaggcttgatccagttgcagttgatgattatccatacataaagattgttgtttgtttttttaagttttagtgggtgcaattatatttgattgtacaccttatgatttgtatgttggtgttttttttgatgtgagaagaagaaagagatgatatggaaagtgtaaatacatgtttaattaatcaattaatattatatggtttgtgttgtagttacttgttgatgtatatgaatgagaacacatgaattgaaaaa

SEQ ID NO: 702 - protein, 163 aa, Cichorium endivia
MDDNLGTRLNGIRQIVKIKEIIQRWQHVTLGARGNDDDADNNRPIGNHPGGGINPAISMRLKGYTVYSDSDIEDGCQSPDPPNDVPKGYLAVYVGPELRRFIIPTSYLSDPLFKVLLEKVEEEFGFDHSGGLTIPCEIETFKYLLNCMEHHQKDHLEDNHATI

SEQ ID NO: 703 - DNA, 699 bp, Cichorium intybus
gggggcctgacggtacagactgaattgaggctcttccgattaggttaagtgccgccaaaaagaaattccacaagacgcttgattggatttattattttcgtgggattaacaattgaaaactttatgcatgtctctcaagtttcggatttcctcaatatattaacatgatcgacctctcttcgtgacagcaattatcaaatggatgtgccaaaaggtcatcttgcggtgtacgttggtgaaacccagaagaggcgatttgttataccaatatatttcttggaccaaccgtcgtttcaagtcttgttgcgtcaatcggaagaagaatttgggtttgaccacccaatgggaggcctaaccatttcctgcaatgaagatgaatttgtcaaacttactatccagttgaaagcttcgtgacagttcttcaatcaattatttgtaattacaagtcctcattaatgtaattcctagcctgtagagtcggtggtgaactttacaccgatgtttgggtacatgtatatcttgaactcttttacaactttttgtaatgtaaaagagattatacaccaaagggcttgtagcccactggtaccggtgttgtcctctcttattgaggttgagggttcaagcctcattagagacatatgtggtaattaaggtgtgatttaggaataatttagataggattatatttgccgttcc

SEQ ID NO: 704 - protein, 163 aa, Cichorium intybus
MEDNLGTKLNGIRQIVKIKEIIQRWQHVTLGARGNDDDADNNRPIGNHPGGGINPAISMRLKGYTVYSDSDIEDGCQSPDPPNDVPKGYLAVYVGPELRRFIIPTSYLSDPLFKVLLEKVEEEFGFDHSGGLTIPCEIETFKYPLNCMEHHQKDHLERHHATI

SEQ ID NO: 705 - DNA, 641 bp, Cichorium intybus
  misc_feature (630)..(630): n is a, c, g, or t
atctgctgctgtgagtgagattccacgatctttacagactcttgcttaacgagcttcttgcttgtgatttcttcttctgatccttggcctttctctatactttcctcctaacccctccctaattctctctattgatttgtttctgtaggtatagatcgtgttgataatttggttttgggaattttgatgggtagtggagataagcattttttaagttttcatctgcatctgcatcatcgtcaccatcacaatcatagatcagaatcagcagacggaggagtccatgaagaaagatcagaacagtataccaaagggatgtatggctgtaatggtggggcatgaaggagaagaacaaaggaggttcatcatacccgtaatctacatctaccatccgcttttcatggagcttttaaaggaggctgaggaagaatacggttttgatcaccgtggacccatcaacataccatgtgacgttcaacagttctgcaatgttgaagggctgatcaagaaagacgatttcttttacaaccaccaacatcaccaccatcatcaccaccaccaccaccaccatcaccaccatatctggtgcttcaaggcttgatccagttgcagttgatgattatccatacntaaagattgtt

SEQ ID NO: 706 - protein, 105 aa, Cichorium intybus
MRLKGYTVYSDSDIEDGCQSPDPPNDVPKGYLAVYVGPELRRFIIPTSYLSDPLFKVLLEKVEEEFGFDHSGGLTIPCEIETFKYLLNCMEHHQKDHLEDNHATI

SEQ ID NO: 707 - DNA, 790 bp, Cichorium intybus
ggcgggggctctgatcacaaaacacaccaaaaaatatctcaaagtctttgacatatacatatatcatatatgctgccatgagtaacattccaagatctttaacagactcttgcttaaccagcttcttgcttgcgatttcctcttctgatccttggcctttctctattctttcctcctaacccctccttaattctctctttgatttgtttctgtaggtatagatcgtgttgttaatttggttttgggaattttgatgggtagtggagataagcattttttaagttttcatctgcatctgcatcatcatcaccatcacaatcataatcagaatcagcagacggaggagtccatgaagaaagatcagaacagtataccaaagggatgtatggctgtaatggtggggcatgaaggagaagaacaaaggaggttcatcatacccgtaatctacatctaccatccgcttttcatggagcttttaaaggaggctgaggaagaatacggttttgatcaccgtggacccatcaacataccatgtgacgttcaacagttctgcaatgttgaagggctgatcaagaaagacgatttcttttacaaccaccaacatcaccaccatcatcaccaccaccaccaccaccatcaccaccatatctggtgcttcaaggcttgatccagttgcagttgatgattatccatacttaaagattgttgtttgttttttaagttttagtgggtgcaattatatttgattgtatacctaatgatttgtatgttggggttttttttgattgag

SEQ ID NO: 708 - protein, 109 aa, Cichorium intybus
MSKAINICSKPSSHKQSSSFPANFKKTTLISLRDRNYQMDVPKGHLAVYVGETQKRRFVVPISYLDEPSFQVLLRQSEEEFGFEHPMGGLTISCNEDEFVKLTIQLQAS

SEQ ID NO: 709 - DNA, 830 bp, Cichorium intybus
gggtagtccaggaaggaggcaaagagtaactggccgagaataagaaaaaaacgtaaaactattccacatttcagttcaatacccatcaaattccccttttgttcttgtgcactgaaccataatctggacatatacgcatcagatctctctgtttctacttattgctaccccaattgaagaacaacaacaccgcgtctctctgttgatcgtcctccttctcctccgaccggcgaccaccaccttcagcgaaggaagatctaggattacaaatatggaagacaatttaggaaccaaactgaacggcatacgacaaattgttaagattaaggaaatcattcaacgatggcagcatgtgacactcggggcaagggggaacgatgatgatgccgataacaatcgtccaatcggtaatcatcctggtgggggaattaatccagcaatcagcatgaggttgaagggatacactgtttattccgattctgatattgaagacggttgtcagagccctgatccgccaaacgatgtgcccaaagggtatttagcggtctatgtaggccccgagcttcgaaggttcatcatccccacaagctatcttagtgatccactgttcaaagttcttctcgaaaaagtcgaggaggagtttggatttgatcacagtggtggcctcacaatcccttgtgaaattgaaaccttcaaataccccctcaattgcatggaacatcatcagaaagatcatcttgaaagacaccatgctaccatttgacgatcaaagacgaaacatcaactgtgtaagtaacgattgggtgcagcttattttctgtgtaaaaaac

SEQ ID NO: 710 - protein, 137 aa, Cichorium intybus
MGSGDKHFLSFHLHLHHHHHHNHNQNQQTEESMKKDQNSIPKGCMAVMVGHEGEEQRRFIIPVIYIYHPLFMELLKEAEEEYGFDHRGPINIPCDVQQFCNVEGLIKKDDFFYNHQHHHHHHHHHHHHHHHIWCFKA

SEQ ID NO: 711 - DNA, 598 bp, Centaurea maculosa
ggcggggaacacaaacttcaccaagaattatatagtttgagctttttcttccttcattagcctttagacgcaacaaagtgtgccctcctcggaaaaatggccattattatgcctcggatcattcaagcaaaacaaattctccgacgatcattctcaaatggaagaaacaatacatacttggccgtgcctaaaggttattttaccgtttatgttggggagcaagagaagaagagatttgtggttcctgtttcattattaagccaacctgcatttcaagaattattatgtcttgctgaggaggagtttgggtacaatcatccaatgggtggcctcaccattccatgcagtgaaaacatgttcaccgatcttgcttctcgtttgggggcgttacgactttattttggaagggagttatgacttgtacattaaagttttaaatttgtaccatgattttgtaaagaactaacctctacggcattttagagtttgtaagacatgtggagacagttgtcccagttttatgaaatatgatctaggaattatttattccttctgtgtcatgagctaaataagacataattcgcaagttgatttcatc

SEQ ID NO: 712 - protein, 98 aa, Centaurea maculosa
MAILMPRIIQAKQLLRRSLSNGSNNTHMAIPKGHFAIYVGEQEKKRFVVPVSLLSQPAFQDLLDQAVEEFGYNHPMGGLTIPCSEDIFTNLASRLGAL

SEQ ID NO: 713 - DNA, 491 bp, Centaurea maculosa
acacaacttcctctcagtccatcacagcatatccgtttttagaacgcagcgggctctccctcctagaaaaatggccattcttatgcctcggatcatccaagcaaaacaacttcttcgacgatcattgtcaaatggaagcaacaatacacacatggccatcccaaaaggtcattttgccatttatgttggagagcaagagaagaagagatttgtggttccggtatcattgttaagtcaacctgcatttcaagatttattagatcaagcagtggaagagtttgggtacaaccatcccatgggtggtctcacaattccatgcagtgaagacatattcactaatcttgcttctcgtttgggggcactataactagaacatagtagttttacatttctagcatatttttgaaaagaactaaccactaggacctttcggagtttgtattacgggtggagacaattgtcccgattttatgaaatttgatttaggaacc

SEQ ID NO: 714 - protein, 98 aa, Centaurea maculosa
MAILMPRIIQAKQILRRSLSNGSNNTYMAIPKGHFAVYVGEQEKKRFVVPVSLLNQPAFQDLLNQAEEEFGFNHPMGGLTIPCNENIFIDLASRLGAL

SEQ ID NO: 715 - DNA, 744 bp, Centaurea maculosa
gtacccgaattatacgcgttgcttttattatagttttatttaaatatgcttgaaattaggatagtacattcttggaaacaatgttgatgagtaagccatgtgatgccaagcaagctataaatacatgcatcaaaataaacccttgtaaaactacaagtctccttttcatatatattcccaacattattcctccaagagcttatacatactatcttcttatacctcttcatcctctctatcttccataaacatgggtcttttatggttgccttgttcgttgatctccaatgtcaaagattttagcagactgaatgcttatcgcaaaagaaatcttcaaacggatgtgcctaaaggtcatctagcagtgtatgttggagaaaaccagaagagacgctttgtcgtcccaatatcatacttagaacggccgttgttccaagagttgttgcgtcaatcggaggaagaatttgggtttgatcatccgatgggaggcctaaccatttcttgcgaagaaaatgaatttttcgagctcacaaccctattgcatgcttcatgatatgatatattatttagtaattagtctttattctttacaattgttgcatattcttttcacctctttgagggtatatacatatcaaaattataatgtaaatataagggacatatattgatacgtaatttttccattgtttattttgtcgtaaaaatctctaattacctcttgcaatacatttcaaatcccgc

SEQ ID NO: 716 - protein, 100 aa, Centaurea maculosa
MGLLWLPCSLISNVKDFSRLNAYRKRNLQTDVPKGHLAVYVGENQKRRFVVPISYLERPLFQELLRQSEEEFGFDHPMGGLTISCEENEFFELTTLLHAS

SEQ ID NO: 717 - DNA, 575 bp, Centaurea maculosa
ctccctctcaatccttaacatttctcaccaaacattagtttgagcattttattccttcatcggcctttagaacaaagcagactctccctccttggaaaaatggccattcttatgcctaggatcatccaagcaaaacaaattctacgacgatcattgtcaaacggaagcaacaatacatacatggccatcccaaaaggtcattttgccgtttatgttggagagcaagagaagaagagatttgtggttccggtatcattgttaaaccaacctgcatttcaagatttattaaatcaggcagaggaagagtttgggttcaaccatcccatgggcggtcttacaattccatgcaacgaaaacatattcattgatcttgcttctcgtttgggggcattataacttgcacatggtagctttacatttcttccatgttttttgtatagaactaaccactatgaccttttggagtttgtaagacgtgcggagacaattgtcccagttttatgaaattgattttggaattatttatctttttgtgtatctatctaagacataaatggcaaactgatttattaacc

SEQ ID NO: 718 - protein, 106 aa, Centaurea maculosa
MAIIMPRIIQAKQILRRSFSNGRNNTYLAVPKGYFTVYVGEQEKKRFVVPVSLLSQPAFQELLCLAEEEFGYNHPMGGLTIPCSENMFTDLASRLGALRLYFGREL

SEQ ID NO: 719 - DNA, 1051 bp, Citrus reticulata
ccacagaacaggtaataaaattaactaatgggaagggtacaattgtcatttactatccaatgagcatttgattcataatcacaaatcttatccaaaaaattaaagatacagagaagatgaaaacgaacaatgaagtaatctcacataccaataccaatttcactagtaattaattcttttatgggcaaattatacacatattagctagctagcccaagtacatggggacaccaatagccaacaagaagatacacatgagagcaaaatacaagatagaatgaaccagaatagaagcaccactggtctgaaagttgccaaactcaaaaaacctgttacggcccggcacctgaatgagcaagcctgggcttagcaatatgaacagcacaacacccacgaaaacagggccccaatctgacatctttctaatgccaatgctatgtagctagcttattagctatcactctctcaaatggcaaaattatttctctgttaaatctcgagtgttaaagagataaaagtattgttattaaggtaaattcaacatcaaatcatgtatacaaaaatgatataagttaacacggattgcatcaatcaatcactatatgtacttcatctgaccaatctttgtaatctagtcagtggcgctagtgtcatcgagccgaggttagacatttccagattttccaaatcatgtttcctagggtctacagtctgctagttagatccatgaatactttttcgctgcatggtattgtgagaccacccataggatgatcaaacccgaactcctcttctgcctgactcagcaaattctgaaaggatgggtgcttcaggtatgaaacaggaaccacaaatctgctcttttcaatctctccgacatagacagctaagtgtccttttggcacagttgaggcctctgaaaccataagagcacgccttagagcctgcttggcgttaacaatcctgaggaagcggatagccatggctaagaattgtgaagtactttgcaagttttacgtaaaattttgaaaatggaaaagaaactgagcct

SEQ ID NO: 720 - protein, 109 aa, Citrus reticulata
MAIRFLRIVNAKQALRRALMVSEASTVPKGHLAVYVGEIEKSRFVVPVSYLKHPSFQNLLSQAEEEFGFDHPMGGLTIPCSEKVFMDLTSRLTLGNMIWKIWKCLTSAR

SEQ ID NO: 721 - DNA, 787 bp, Carthamus tinctorius
tccacattctcagcaccacgtcccaccaccaccgccgttcgttcaaaccctaattccaccaccacctccaccaccaccgccgccgccaatggggatcaagaaatcaaacaagctctcgcaagccgccctcctgaaacaaatcctcaaacgatgctcgagcctgggcaagaagcacggcggctacaacgacgtcgacgtccccaagggccatttcccggtctacgtcggagtcaaccggacccgatacatcgtcccgatctccttcctcaccacgccggagttccagctcctcctccgccgtgccgaggaggagttcgggttccaccacgagatgggcctcaccatcccctgcgaagaggtcgtcttccgatccctaacctccatgctccggtgaaaaaagggtttcgtttttccggtctccggcgaggggtaaaaaagtaaaaacgcaaaaaaccaaaaaaggtagcgatttgctttttccagagatggaattgctaagttcagagaagggtacatgtggtgaaacggaacgtacgagtttttgatgcgggacggatctggaaagagttttttaagcctttttttttaaagggtgactgctttttccagaggtgggattgctaagttcagggaactgtgcaagtggtgaagcgggatgtacaagtcttgaaagcagtgcagctctgagaaaaggggattgcctttttttttaaccattttttttcttttttttttttctgactctaacccaaaatactttaagattagtatttttattttaattatt

SEQ ID NO: 722 - protein, 98 aa, Carthamus tinctorius
MAIIMPRTIQAKQILRRSFSNGSNSTYLAVPKGYLAVYVGEQEKKRFVVPISLLSEPAFQELLCQAEEEFGYNHPMGGLTIPCSEHMFTDFASRSGAL

SEQ ID NO: 723 - DNA, 845 bp, Carthamus tinctorius
tctcatccagaagtctctctttcttcaattcgccaaaaaccgtaccaactgaaaaacaacaacaacaacaaaaatagcgaactcaaaaatgtcgggaggctgcagcaaaatccgccacattgttcagctccgccaaatgctacgacgatggaggaagaaagccgcaatggcgtctcgcagatgcataccttccgacgtccccgcgggccacgtcgccgtctgcgtcggctcgaattgccgcaggttcgtcgtccgagccacctacctcaaccacccggtcttcaagaagcttctggtccaagccgaagaggagttcggcttttccaactccggcccgctcgcgatcccgtgcgacgagtatttattcgaggagataatccggttcttgtcccggtccgattccgcggccagccgattcgtcaatctagaggagttccaaagacactgccacgtcggcatccggagtaacctcgatttctggccggaatctcgaccgctcctccgatgagcccgaaaaaaaaaattaataataataaaacagacgaattgacttcgattttgaccccgagtcgactcgtccgatcatgcacaaagaaccgagttacgccggttcgaggacttcttatgctgcgtctggtaaaaataagtcagcttataagccagtaatttcatctcgcaatacgtgaaggtaaagttttgcgggtaccgatgacaaggagtcttttctagttctttttcccttttttgtctttgtatttttacggaattaccccaaaatgtaattggttggtttggggggtgggtggtgggttactgagttaactcaccaacgtaaaggagatggc

SEQ ID NO: 724 - protein, 101 aa, Carthamus tinctorius
MGIKKSNKLSQAALLKQILKRCSSLGKKHGGYNDVDVPKGHFPVYVGVNRTRYIVPISFLTTPEFQLLLRRAEEEFGFHHEMGLTIPCEEVVFRSLTSMLR

SEQ ID NO: 725 - DNA, 729 bp, Carthamus tinctorius
actcctatacgacttctttcactttagagaaatccataatctctctttctcttttttcgcggacttggaaactccattcctagattcgttacccgaaaaatctagaagaatcttcccttctgtctatagactaaagacatgggtatgggaataatcaaaatcgccaatgcgaaacaaaagcttaaacgatcgatcacaccaaagaagaacggattactggctactgattcccgaaagaaaggacacttcgctgtttacgtaggagagactcacaagagatacgtcatcccgttatctaccttggaccaccccttgtttcgtgaacttttacattgggcggaagaagaatttggttttgacaactcggaaggaggtctcaaaattccttgcaatgaagattactttgaaggtctcatttccctgataagttctacttgatttagggtaattaaggagacattagttagagatgcattttagcattttcgatacttcttccgtcaagagggctgtaaatcataacggtcaaaacgctcatcccggaataccgttcatgtgaaaccgtacctttgagatatgaattcatgatttctaagttatcatgagcagatttaagccatttacacaattgtgaccaaggagatagtactactatgtttgtaatcatgacaaggatcatttctcaattcaagtaaaattttcatgatagttttagaccaaaaatgttag

SEQ ID NO: 726 - protein, 99 aa, Carthamus tinctorius
MGMGIIKIANAKQKLKRSITPKKNGLLATDSRKKGHFAVYVGETHKRYVIPLSTLDHPLFRELLHWAEEEFGFDNSEGGLKIPCNEDYFEGLISLISST

SEQ ID NO: 727 - DNA, 505 bp, Carthamus tinctorius
cggggacacatacttcaccagaattagtttgaggcttttcttccttcattagcctttagacgcagcaaactgttccctccttgaaaaaatggccattattatgcctcggaccattcaagcgaaacaaattctccgacgatcattctcaaatggaagcaacagtacatacttggccgtgcctaaaggttatcttgctgtttatgttggggagcaagaaaagaagagatttgtggttcctatatccttattaagcgaacctgcatttcaagagttattatgtcaggctgaggaagagtttgggtacaaccatccaatgggtggccttaccattccatgcagtgaacacatgtttacagattttgcttctcgttcgggggcattatgacttttacatggatattttaaatttctaccatgatttgtaaagaactaactactaggaccttttagagtttgtaagatgtatggagacaattgtcccatttttattgaattatgtttagaa

SEQ ID NO: 728 - protein, 102 aa, Carthamus tinctorius
MAFRKSSNKLSQAAIVKQIMKRCSSLGKKQQQHNDDVPKGHFVVYVGENRSRYVIPISFLSRPEFQNLLQRAEEESGFDHDMGLTIPCDEQVFKSLYFNIIS

SEQ ID NO: 729 - DNA, 553 bp, Carthamus tinctorius
ctccctttgacaaatacttcaccaataatattactttaagcttttcttccttcatcagccttcattaaatatacactttgcctcctaggaaaaatggccattcttattccacgaatcatccaagcaaaacaaattctccgaaaatctttgtcaaatggaagcagcaagacgtatgtcgtaatcccaaaaggttattttgccatttatgtcagggagccagataataagagatttgtagattccagtatcattgatgagccaacctgaatttcacgaattattatgtcaggtcgaggaacaatacgggcactaccatccaacgggtggcctcaccattccatgcaccaaagacacattcattgatcttgcttctcgtttaagggcattatgacttgtacatggaaattttaaatttctactttccttttgtacagaattaacctgcacatagggccttttagagtttgtaagacgtgtggacactattgtcccagttttacgaaatatgatttacgaattatatttccttatcgaccatcctaagtttttaaac

SEQ ID NO: 730 - protein, 60 aa, Carthamus tinctorius
MSGSQIIRDLIPVSLMSQPEFHELLCQVEEQYGHYHPTGGLTIPCTKDTFIDLASRLRAL

SEQ ID NO: 731 - DNA, 642 bp, Carthamus tinctorius
ttttctttcctttactttcacaactcaaactctctttctctcttccattaatatttcccaaaaacagtgacatttgctaattcccaaaaatggccttcaggaaatcatcaaacaagctctcacaagcagcaattgtgaagcaaattatgaagaggtgctcaagcttaggaaagaaacaacaacaacataatgatgatgtacccaagggccatttcgtcgtttacgttggtgaaaaccgtagccgatacgtcataccaatttccttcttgtctcggcccgaattccagaacctgctccaacgggccgaagaagagtctgggttcgatcacgatatggggctaaccattccttgtgatgaacaagtttttaagtcactttacttcaatataatttcttaattaattaggttaattaattgcctacttgaattagagaatatacatgatctaagagtgctactattatttcccttcattcttttcggtttaattactctaaccacgcaattaaaaattaatttaaagaaaacttgtaatgggtttttttaaattaatttgtaaatcttacacagaagttctctcaccaaatgtatttcggtttttcttctgggttgtggtttaaatgttatatatataattgtgg

SEQ ID NO: 732 - protein, 139 aa, Carthamus tinctorius
MSGGCSKIRHIVQLRQMLRRWRKKAAMASRRCIPSDVPAGHVAVCVGSNCRRFVVRATYLNHPVFKKLLVQAEEEFGFSNSGPLAIPCDEYLFEEIIRFLSRSDSAASRFVNLEEFQRHCHVGIRSNLDFWPESRPLLR

SEQ ID NO: 733 - DNA, 673 bp, Fragaria vesca
cacttcactctgccttctccatttctctctggctttgagcaagttcaccctttcggtcatcgttgaggttaagaaatggcgatcagaaaacccaacaggcttactcaagcggcgatgctgaagcagattctgaagaggtgctccagcttggggaagaagcagcaacactatgatgaacagggcttacctttggacgtgccaaagggacactttgtggtttatgttggggaaaacagaagcaggtacatagtacccatctctttcctgacccgacccgagttccagagcctgcttcaccaagctgaggaggagttcgggttcgatcacgacatgggtctcaccattccttgtgaagaagaagctttccagtcactaacatccatgctgagctcttaggaggattcctcgctctttttgtgagaaaatggctcaagaaaaacaagatgaagctgctttacttgcttctctgtttctttcttccaagattttctcattgcaaaattcaaaaattgactctgacccgagagaacggattcaaaaacccagatggatattatgattttatttaccatctgggtttggaaatgtaaatgttatatttaaagtttgaggaattttcatctctagctctcacggtggtggttgtggggatttgtagtaccaatgtaaccct

SEQ ID NO: 734 - protein, 83 aa, Fragaria vesca
MGFQLPRIANTKTSDIPKGYFAVYVGESQKKRFVVPISYLNQPLFLDLLSQAEEEFGYHHPMGGITIPCSEDTFLDLTSRLSV

SEQ ID NO: 735 - DNA, 650 bp, Fragaria vesca
agcagatcctcaaaagatgctctagcttggggaagaagcaacacggctacgatgaggatggtcttcccatcgacgtccccaagggccatttcccggtgtacgtgggagagaacaggacgaggtacattgttcccatctccttcttgactcaccctgagttccaatgcctcctgcgtcaagccgaagaagaattcggcttcgatcacgacatgggcctcaccattccttgcgaggaagtcgtttttcgttctctaacttccacgctcagatgaacgaaccatgcatatccagagatcgatggagtttcttgaagaagatggccaagatgaagctcccccctttgcttctctttttttcaccatctttcttcatattttttcgtcgatttttattcgtttggattctttttaggggtgttatcgatcgggagcggttttgctataaacccttttgatgtttgatttagtgactctaacctggaatttaacccatgaacatgtaaatgggtttcattttgtataaagtttgtgatcatcgatggatcgattttactcgcataggtagtagtttgttacgtaccctgtgagagaagctactgtactactatcaatgaaagacgtactggatcatcatatcctgtttgcttttac

SEQ ID NO: 736 - protein, 106 aa, Fragaria vesca
MAIRKPNRLTQAAMLKQILKRCSSLGKKQQHYDEQGLPLDVPKGHFVVYVGENRSRYIVPISFLTRPEFQSLLHQAEEEFGFDHDMGLTIPCEEEAFQSLTSMLSS

SEQ ID NO: 737 - DNA, 645 bp, Fragaria vesca
gtcaaatgctacaacgctggcacaagaaggcgcacctcaaagccgcctccccgtccgacgtccccgcaggacacgtcgccgtctgcgtcggcagcaacggcagacggttcatcgtgcgagcaacgtacctgaaccaccccatcttcaagaagctgctggtgcaggccgaggaggagtatggcttcgccaaccagccgggacctctgaccatcccatgcgacgagtcgttcttcgaagaggttctgcaggtgctctccaggtcggagtctgcaggtagatccgggaggttcttgagcttggaggatctgcagagaccctgccatgttgatattctgaacaatcttcaggttctggatgaatcatggcctttgcttcatgggatggctgataagtcagtatgttaatgaattagatccatgcatgtttcagtactggagggttgagcttagagatcactatatattatatgtcagctgggattccgagttgcaagaacttctaacatttttggtttaacaatactgctgtacgtagtatttctattagggctttcctcagaggagaatttgtgtattaattactaaattttttctttttaagggtttgtattaattactaaattgatattaagaaattgtacaactt

SEQ ID NO: 738 - protein, 132 aa, Fragaria vesca
MLQRWHKKAHLKAASPSDVPAGHVAVCVGSNGRRFIVRATYLNHPIFKKLLVQAEEEYGFANQPGPLTIPCDESFFEEVLQVLSRSESAGRSGRFLSLEDLQRPCHVDILNNLQVLDESWPLLHGMADKSVC

SEQ ID NO: 739 - DNA, 717 bp, Fragaria vesca
aactcaactcattctctcattgcaagcatcaaattaagctttctctgcttcccaagacctttgcattcttttcatccttctttgatcacttcaaaatacacagattaaccatgggtttccaattgcctcgaattgccaacacaaagacatcagatatcccaaaaggttactttgcagtctatgttggagaaagccagaagaaacgatttgtggttccaatatcatatttgaaccaacctttgtttctggatttgctgagtcaggctgaagaagaattcggataccatcatccaatgggcggtatcacaattccttgcagtgaagacaccttccttgatctcacttcccgcttaagtgtgtgaaggaggactaatgaagcggatcttggatccaaaacctcctcattttgaaactcgctgctgagtcaacctgaagacaagtctttgcttgatgatccaactgaatggatacacacctgttcaaggaaaactgcaggaaccctgaagcagcaattgagctgattgagcaagaagatacaaaatttgtgaagcagacaaatgagatgccatatgagctctgtattactgtataacagttggcccatgattagagctccaacttttgtactcacagtcagaattctgtgcggctctttttattgctatcaagaaaagcattgagaatatattttaaattgtcaactttcttaaaaaaaaa

SEQ ID NO: 740 - protein, 167 aa, Fragaria vesca
MTKIRGFKLGKRLCRVTRWFFRKPTTRPGYHRLSRPTSSAPPCKYKPIAKLLTWGRQLTTGAKSLCCSRPGSGYMQLGQNPVEETKPVTVPKGHLAVYVGQKDGDFHRVLVPVIYFNHPLFGQLLKEAEQEYGFAHPGGITIPCPISDFEKVKTRIAAGSGHRRLAW

SEQ ID NO: 741 - DNA, 532 bp, Gossypium hirsutum
tcatatcctcctctacaagcaaatctttccattcatctttttgagtcttttccattattattcttcccactcaagttactaacagcaatggctatccgtgtgccaagaattatgcatgctaagcagattcttcgtcattctaaactgtttgcaaatcaagcagcctcggactcaacggttgttcccaaaggatacattgcagtgtatgttggggagagccaaaagaagagattcatagttccaatctcattcttgaatcagccttcgtttcagaagttgttaagtatagctgaggaagaattttgattcaatcatccaatgggtggtctcactattccttgcagagaagaggtttttgttgatctcacttcaagcttgcattagtagccaactgataaaagaaatttaatcagctgatacaatttttgaccattcatgtacatccttctattcatttggtagaaagagatgattcaaatgaatactcatctgagaaattgttctaatacaaagtacagcggttctattctcg

SEQ ID NO: 742 - protein, 96 aa, Gossypium hirsutum
MGVRLPSMISSAKQILKLQSRISRDKPDVPKGHIAVYVGETQRKRFVVPITVLNHPSFNDLLKRAEEEFGFNHPMGGLTIPCREDAFLNLTSRLQA

SEQ ID NO: 743 - DNA, 517 bp, Gossypium hirsutum
gctttctaagttatctgagatcctccacttcttcctttttcaaagcatacatctattgtaaacaaaaatggctatccgcttgcctcgtatcataagctctaagaaagttcccaagggctactttgcagtttatgttggagaaaaccagaagaggtttgtgataccagtgtcattcttgagccagcctttatttcaagatttgctaggcaagtcagaagaagagttcggatatagtcatcctaccggtggtctcacaattccctgcaatgaagatatttttcttgatgttacctctcgcttgaatcaattgtgagagaatcaacacaaatctgcctatacaattttgtaaagccaaaatgtctaacaccatgtaaacattttttctccatctcttttgccttggggagcaaatacaagtctccctaagtgaaaaattacagatggttgttactgtaacttctatcaatcagcatggaaaatgacagttcaaaacacatcattcaattggaattttatg

SEQ ID NO: 744 - protein, 79 aa, Gossypium hirsutum
MAIRLPHIISSKKVPKGYFAVYVGENQKRFVIPVSFLNQPLFQDLLGMSQEVFGYSHPTGGLTIPCKEDIFLDVTSRLN

SEQ ID NO: 745 - DNA, 546 bp, Gossypium hirsutum
agcgccaaagcctttcctagcaggttctctaagttactcacatttcctcatcctaactatctcataaaaaagccatgggtttctgcttgccaagaattgttaatgctaagcctagtctgaaacggagcctttcatcttcggagacaacaatggtgcccaaaggccactttgctgtttatgttggagaagttgatgaaaagaagcgattcgttgttcctatatcattgctgaagcatccttcattccagaatttgttgagtcaagctgaagaagagtttggtttcaatcaccccaagggtgcattgacaatcccttgtagcgaagaagctttcattgatctcacttgcaatctgaaaagttcatgagaagaaattggctaaccaagcagagattgattgatctttagctcatctaacacctcccaaattttagttttaggaagcaagtgtgtaaggtgggttgttttttgcaatcccatgcccttgtcaacgaaattgatttttgtaaccaatatataaatttttcaatgaaactttcttttcatgg

SEQ ID NO: 746 - protein, 81 aa, Gossypium hirsutum
MAIRLPRIISSKKVPKGYFAVYVGENQKRFVIPVSFLSQPLFQDLLGKSEEEFGYSHPTGGLTIPCNEDIFLDVTSRLNQL

SEQ ID NO: 747 - DNA, 544 bp, Gossypium hirsutum
ggaaaactacatcatttcagtatctgtcaaccaggatcatcatcgttgtcatcaactcaagcttttggtgtcttcaactaaggatcagatatgggtttccgtttaccttctgtgattcttcatgccaagcaagttctaaaactgcagtctaggaaccagacagatgttccaaaaggccatattgcagtttatgttggagaaatccagaagacaagatttgtggttcccatttcatacttgaatcacccttcttttgtggatttactcaacctggctgaggaacagttcgggtttaatcatcccatgggtggtcttacaattccatgcgacgaagatgcctttcttcatctcacttctcagctgcatggctgctgaaagattaatatataagttttgttaactgaattatttaattccattatagaatattataagaacttgtaactgtagatacgaccttttgacaactgacatgaatggagtgaagagatagattatgtatgctctctcccaacaagattttgtcaaaaaatgataatgaaat

SEQ ID NO: 748 - protein, 97 aa, Gossypium hirsutum
MAIRVPRIMHAKQILRHSKLFANQAASDSTVVPKGYIAVYVGESQKKRFIVPISFLNQPSFQKLLSIAEEEFFNHPMGGLTIPCREEVFVDLTSSLH

SEQ ID NO: 749 - DNA, 513 bp, Gossypium hirsutum
aactcctaccttcaacattctcaagcttgctttcctagttatctgagttcttccttttcttccctttgagaagcataaatctatcaaaaacagcaatggctatccacctacctcatatcattagctctaagaaagttcccaagggctactttgcggtttatgttggagaaaaccagaagaggtttgtgataccaatttcattcttgaaccagccttcatttcaagatttgctaggcatgtcacaagaagagttcggatatagtcatcctactggcggtctcacaattccctgcaacgaagacatctttcttgatgttacctctcgcttgaattatgtcaaatcagctcatacatttctgtaaagcaaacatcactaacaccatttacacttttttcccatcctttttgccttcgggagcagataataagtccccctaagtggaatattagagatggtggcttctgtaacagtttggaacacatcattcaattgaaattttatttcttgttatg

SEQ ID NO: 750 - protein, 88 aa, Gossypium hirsutum
MAIHLPHIISSKKVPKGYFAVYVGENQKRFVIPISFLNQPSFQDLLGMSQEEFGYSHPTGGLTIPCNEDIFLDVTSRLNYVKSAHTFL

SEQ ID NO: 751 - DNA, 509 bp, Gossypium hirsutum
aagaaacctgaaagaattcacaagttactactgcaaccttaaatttcaatatctatatctccttgtatttccctttcattatttcgaattatgggtgttcgtctaccgtccatgatttccagcgccaagcaaatcctcaagctgcagtctcgtatttcaagagataaaccagatgttccgaaaggtcacattgcagtttatgtgggggagacgcaaagaaaaaggttcgtagtcccaataactgtgttgaaccatccttcgttcaacgacttgcttaagcgagcagaggaagagttcgggttcaatcatcccatgggtggtctaacaattccttgcagagaagatgccttcctaaatctcacttctcgattgcaggcctaataagagattcaaagggccactcgttcacaattttgattcctcttttttttctttctccatttgtgaagctgtaaaccaatgtaatgtacagaagcagcaaaagttatcaacaaaattgcgggccgatg

SEQ ID NO: 752 - protein, 96 aa, Gossypium hirsutum
MGFCLPRIVNAKPSLKRSLSSSETTMVPKGHFAVYVGEVDEKKRFVVPISLLKHPSFQNLLSQAEEEFGFNHPKGALTIPCSEEAFIDLTCNLKSS

SEQ ID NO: 753 - DNA, 535 bp, Gossypium hirsutum
aaaacacctagtttcaacattctcaagtttcctttccaagttatctaagatcttcctactcttccctttgaagcacacatctatcaaaaacaacaatggctatccgcctgcctcatatcattagctctaagaaagttcccaaaggctactttgcggtttatgttggagaaaaccagaagaggttcgtgataccggtatcgttcttgaaccagcctttgtttcaagatttgctaggcatgtcacaagaagtgttcggatatagtcatcctacaggtggtctcacgattccctgcaaggaagacatctttctcgatgttacctctcgcttgaactgatttgtgagagaattaacacaaatcaacccatacaattttgtaaagcaaacatcactaacatcatgtaaacactttcttctcccatccttttttgccttggggagcagataataagtctccctatgtggaaaattagagatggtggcttctgtaacaattggaaacacatcattcaattgaaattttatttctttttcgaa

SEQ ID NO: 754 - protein, 94 aa, Gossypium hirsutum
MGFRLPSVILHAKQVLKLQSRNQTDVPKGHIAVYVGEIQKTRFVVPISYLNHPSFVDLLNLAEEQFGFNHPMGGLTIPCDEDAFLHLTSQLHGC

SEQ ID NO: 755 - DNA, 475 bp, Gerbera hybrid cultivar
caacatctttaagaaaatggctattcgtatgccgcggatcattcaggcaaaacaaattcttcaacgttcatcctcaaatcgaagccacagatcaacctctgcagacactccaaaaggacatttggctgtttatgttggagagcaagagaaaaaccgatttgttgttcctgtttcactgttaagccagtcttcattccaagacttgctacatcaagcagaggacgaatttggatacgatcatcctatgggtggcctcacaattccgtgtagtgtagacgtgttcattgaccttatttctcgccatggtgcattatgactgatgagttatcacattgtgtttgctaacacaactttgtagagtagtgtgcataacaattaactgtttgtaaagcagagggaataacgtgccctataaattgtattttgatggttctatgtagtttgagtagaatcttagaatgaaaagctttgttcc

SEQ ID NO: 756 - protein, 99 aa, Gerbera hybrid cultivar
MAIRMPRIIQAKQILQRSSSNRSHRSTSADTPKGHLAVYVGEQEKNRFVVPVSLLSQSSFQDLLHQAEDEFGYDHPMGGLTIPCSVDVFIDLISRHGAL

SEQ ID NO: 757 - DNA, 427 bp, Glycine max
atcagaattcaaatatttctttcttatacaagtcctttggcatcagtacattatttgttgtgtggagatttaaaaaacaatgggtttccgcatagcaggtattattagacgagtgtcattttctacaacccaagcagcctccaaggggattgaagtaccaaaaggctatcttgcagtctatgttggagataagatgaggcggtttgtgattccagtatcatacttgaaccaaccttcatttcaagaattattaagtcaagcaaaagaagaatttggatatgatcatccaactggtggtctcacaattccatgtcaggaggatgtgttcctaaatgtcacctctcgcttgaatgagttgtaaatcatgctaatggagacgtagattagattagttgaggcaaatttgtacagaaggcactttctttta

SEQ ID NO: 758 - protein, 99 aa, Glycine max
MKTGNRFVGIAHAKQKLQRTLSQRIKLASAVADVPKGHLAVYVGENHKRFVIPISYLSHPLFRDLLDWAEEEFGFNHPMGGLTIPCTEDYFISLTSSLN

SEQ ID NO: 759 - DNA, 455 bp, Glycine max
tagctctgccactaaaaaatttctctcacttaataatatctttagactttgattcatatatagctttctccatcatgaagactggtaacagatttgtggggatagctcatgccaagcagaaacttcagagaacactttcacaaagaatcaaattggcttcagctgttgctgatgttccaaaaggccacttggcagtgtacgttggagagaaccataagaggtttgtgattccaatatcttacctaagccaccctttattcagagacttgttggattgggctgaagaagaattcggattcaatcacccaatgggtggcctcactattccatgtactgaagattacttcattagtctaacttcttctcttaattagttagtagttaaaaagctggcaatgctttcaatcatcaaattgacccattggacattggttattttgattttcctagttgat

SEQ ID NO: 760 - protein, 92 aa, Glycine max
MGFRLPGIRKGIFAANQASSKTVDAPKGYLAVYVGEKMKRFVIPVSYLNQPSFQDLLSRAEEEFGYDHPMGGLTIPCSEDVFQHITSCLNGQ

SEQ ID NO: 761 - DNA, 514 bp, Glycine max
  misc_feature (406)..(406): n is a, c, g, or t
gcacgaggcaagtatcagaattcaaatatttctttcatatacaattagtcctttgcactatttgttgtgttgagcaacagaatacaatgggtttccgcatagcaggtattattagacgggcatcatgttctacaacccaagcagcctccaagagggttgaagttcccaaaggctatcttgcagtttatgttggtgataagatgaggcggttcatgattccagtatcatacttgaacccaccttcatttcaagaattattaaatcaagctgaagaagaatttggatatgatcatccaactggtggtctcacaattccatgtcaggaggatgagttcctaaatgtcacctctcgcttgaatgagttgtaaatcatgttaatggagactgagatagattagatgagacnaatttttacagtaggcacattcttttattgtaaaggttttccattttctttccttgtatgattccaaaggaagatgaatgagaatacatacaagacatagtgtaaacg

SEQ ID NO: 762 - protein, 93 aa, Glycine max
MGFRIAGIIRRVSFSTTQAASKGIEVPKGYLAVYVGDKMRRFVIPVSYLNQPSFQELLSQAKEEFGYDHPTGGLTIPCQEDVFLNVTSRLNEL

SEQ ID NO: 763 - DNA, 547 bp, Glycine max
aattcggcaccagattcatggctcttcatgctaacaagatattcaagtggcagcagcatctccatagtagaaaccactcgaatgttccaaagggtcacatagtagtgtatgttggagaggctcaaaagaagaggtttgtggttccaatatcttacttgaaccatccttcgtttgttgacttgctaaaccgagtcgtggaagaatttggctacaatcatccaatgggcggtctcactatcccttgcaaagaagaggcattcatcactctcacctctcaactacgtgcctcctgaacctgaaggatctatctatatatctgtcttcatttttcagcctgctgtattcaacatttgagtgtttttcctactgactccactcttgataaatagatatgtattccactgtataaagtttaactatatattcactgtatgtgagaagcaaaatagccactaccgaatttaactaatacgtacagtttttgtaatttagactctaaaattcatttcctgtcatttaaagcttgcaaattagagttatgctggtc

SEQ ID NO: 764 - protein, 93 aa, Glycine max
MGFRIAGIIRRASCSTTQAASKRVEVPKGYLAVYVGDKMRRFMIPVSYLNPPSFQELLNQAEEEFGYDHPTGGLTIPCQEDEFLNVTSRLNEL

SEQ ID NO: 765 - DNA, 494 bp, Glycine max
gcacgaggcaagaattctctaagcatcaaaaaagaattaagcataatgggtttcagtttgcgtggtcttcaaaggcgtgtggatgtcccaaagggccgtgtagcagtgtatgtaggagaaaatcaaaagaagcgctttgtgattcccatatcatacttgaaccaaccttcatttcttgagttgttgaatcaagctgagcaagaatttggatttgatcatccaatgggtggcctcacaattccttgcaatgagaatgtcttcctagatgtcacttctcgcttgcatagccgatagattaaggagctcaattaacatagatatatcatgcaagtgtcaatattgataaactaattatatagttttgtagaaatgactaagtctaaccttgtagactttttcttctttccattttgttccccgcaaggaaacggaatgatgtactgattgtactctaacagagaattctatgaacgaagattagttagactttttct

SEQ ID NO: 766 - protein, 82 aa, Glycine max
MGFRLPGIRKASNAVDAPKGYLAVYVGEKMKRFVIPVSYMNQPSFQDLLTQAEEEFGYDHPMGGLTIPCSEEVFQRITCCLN

SEQ ID NO: 767 - DNA, 511 bp, Glycine max
tcacatccaaaagcattcaaaatccagaagcatattttcaaggacttttctcaaaccattatcttcgcaagtctctaagacagccattacagcaatgggtttccgtttacctggtatcagaaagggaatatttgcagccaaccaagcatcatcaaaaacggtggatgcaccaaagggctaccttgcagtttatgttggagagaaaatgaagcgatttgtgatccctgtgtcatacttgaaccaaccttcatttcaagacttgttgagtcgagctgaggaagagtttggatatgatcatcccatgggcggcctcacaattccttgcagcgaagatgtcttccaacatataacttcttgtttgaatggacaataaatctcacactttaggagactgacatagattagtagtgacattttgtacaataggcatcttctcaatttgtaaagatctccctttcttcagaaacagggaaagaaagacaactagattgacaaaatctcaatatgtcaa

SEQ ID NO: 768 - protein, 91 aa, Glycine max
MALHANKIFKWQQHLHSRNHSNVPKGHIVVYVGEAQKKRFVVPISYLNHPSFVDLLNRVVEEFGYNHPMGGLTIPCKEEAFITLTSQLRAS

SEQ ID NO: 769 - DNA, 398 bp, Glycine max
agcgtctactctttaccagaagggcatcatttgctgcaaaccaagcatcttcaaaagctttggaggtgccaaagggctatcttgcagtctacgttggagagagaatgaagcggtttgtgatccccatatcatacttgacccaattttcattccaagacttgttgagtcaagctgaggaagagtttggatatgatcaccccatgggtggtcttacaattccttgcagtgaagatgtcttccaaaacataacttcacgtttgaatggactataaatctcgtagcgtagaagactgacatagatttgtagacatttggtacactaggaatcttctcaatttgtaaagatctcctttttgagaagtaggagaaaagaaaagaccattagaatgacaattttg

SEQ ID NO: 770 - protein, 82 aa, Glycine max
MGFSLRGLQRRVDVPKGRVAVYVGENQKKRFVIPISYLNQPSFLELLNQAEQEFGFDHPMGGLTIPCNENVFLDVTSRLHSR

SEQ ID NO: 771 - DNA, 334 bp, Gossypium raimondii
gtgataccagtgtcactcttgaaccagcctttatttcaagatttgcttggcatgtcagaacaagagttcggatatagtcatcctaccggcggtatcacaattccctgcaatgaagatatctttctcgttgtcacctctcggttgaactgatttgtgagagatttaacacaaatcaacccatacatttttgtaaagcaaacaaaactaacactatgtaaacacctttttcccatccttttctgccttggggagcaaatacaagtctccctaagtggaaagttagagatggttgttagtgtaacttctatcaatcagtacaaaagatggcagttct

SEQ ID NO: 772 - protein, 98 aa, Gossypium raimondii
MAIRVPRIMHTKQILGRSKLFANQAASNSTDVPKGYIAVYVGESQKKRFIVPISSLNRSSFQKLLSIAEEEFGFNHPMGGLTIPCREEVFVDLTSSLH

SEQ ID NO: 773 - DNA, 804 bp, Gossypium raimondii
taccattcatctttttgagtcttctccattattattcttcatactcaaagttactaacaaaaatggctatccgtgtgccaagaattatgcatactaagcagattcttggtcgttctaaactgtttgcaaatcaagcagcctcgaactcaacggatgttcccaaaggatacattgcagtgtatgttggggagagccaaaagaagagattcatagttccaatctcatccttgaatcggtcttcatttcagaagttgttaagcatagctgaggaagaatttggattcaatcatccaatgggtggtctcacaattccttgcagagaagaggtttttgttgatctcacatcaagcttgcattagtagccaactgataaaagaaatttaattagctaatacaatttttgaccattgatgtacatccttctattcatttggtaggaagagatgattgaaatgtatactcttcttagaaactattttattataaattacagcggttctattctcaaaatttcctcttgttaaatacattgttcagttcatattgctcctttacaccagttgtcgtgtctgatgaacatgtagctattagtagctcaccagaaaacatcaaaatctcgctccaacccaagcctacaatcctcctcgcttttctatgggaagtaaccataaaaatttctcccaggaaaataggttagttgaaacttgaaagaaggaaaatcatcaggaatggatttggattaaatttgggttaaaatgaaccaggcctcagtcttcttatgccaaagggtttagtacaaaacta

SEQ ID NO: 774 - protein, 161 aa, Gossypium raimondii
MDDQGGSKPTGIRQIVRLKEILQKWQTITLCTMPSTDTPHSEENHGVFCPPINQRLKNIMSFDSDEDSCHGSEPPPDVPKGYLAVYVGPELRRFIIPTSYLSHPVFTILLEKAEEEFGYDHNGGLTLPCEIETFKYLLKCIENHPNNHPVGSSVSEQLEIH

SEQ ID NO: 775 - DNA, 518 bp, Helianthus annuus
tcaaaactcatctacacatcatatctttcccaggaagcgctacttcgattcttatcttccttcacaacttttgtaagtgagcagcctctagcttccttgaaaacatggccatacgtatgccacgcatcattcaagcaagaaaaattctcaaacggtccctctctaatggtagcaccactcctgcatctatggacatccccaaaggctattttgccatttatgttggagaacaagagaagaagcggtttgtggtgtctgtatcactactaagcgaacctacctttcaggtgctactgcatcaggcagaagaagagtttgggtacaaccatccaatggacgggctcacgattccctgtagtgaagatgtattcacagatctggcttctcgtttgggagcattttgacttgtatacatctgtctatatctacaacagttttgtaaacatctaaccagtaggaaccatttagagttgtaaatttagatcattgatccagatgaatgaaattctatttggata

SEQ ID NO: 776 - protein, 99 aa, Helianthus annuus
MAIRMPRIIQARKILKRSLSNGSTTPASMDIPKGYFAIYVGEQEKKRFVVSVSLLSEPTFQVLLHQAEEEFGYNHPMDGLTIPCSEDVFTDLASRLGAF

SEQ ID NO: 777 - DNA, 524 bp, Helianthus annuus
cggggaatcaaactcatctacaacatcatatctttcaccaggaagcgctacttcgatacttatcttccttcaacaacttttgtaagtgagcagcctctagcttccttgaaaacatggccatacgtatgccacgcatcattcaagcaagaaaaattctcaaacggtccctctctaatggtagcaccactcctgcatctatggacatccccaaaggttattttgccatttatgttggagaacaagagaagaagcggtttgtggtgtctgtatcactactaagcgaacctacctttcaggagctactgcatcaggcagaagaagagtttgggtacaaccatccaatgggcgggctcacgattccctgtagtgaagatgtattcacagatctggcttctcgtttgggagcattttgacttgtatacatctgtctatatctacaacagttttttaaacatctaaccagtagaaaccatttatagttgtaaatttagatcattgatcccgatgaatgaaatttagtttgg

SEQ ID NO: 778 - protein, 99 aa, Helianthus annuus
MAIRMPRIIQARKILKRSLSNGSTTPASMDIPKGYFAIYVGEQEKKRFVVSVSLLSEPTFQELLHQAEEEFGYNHPMGGLTIPCSEDVFTDLASRLGAF

SEQ ID NO: 779 - DNA, 530 bp, Hedyotis centranthoides
gaagtcttcaacacatttcatctttttactaatttcttctttcattccgaattagatccatcatcattgaaatggccatccgtctttctcgtgttattcaggctaagcaactcttgaagcgggctaattccttcacatcgaaaaacggttcatcatatgatgttccaaaggggtattgtgccgtatatgttggagatagtgatgagaagaaaagatatgtgatccccattacttacttgaaccagccctcctttcaggaactgttgagccaagctgaggaagaatttggttacgatcatccaatgggaggcttgacaatcccctgcagagaagacatcttcatcgacctaacttctcgattcagtaggaattaattaattccagtcagctctaattgtctgtaaccagagatgatgaagcaaagttttgtaacttagtatgtaggggaaaaacaagcagagattgctcttgtacattctgttactgattctctcataaattcaaagtttgatcttaactcaacaaagttg

SEQ ID NO: 780 - protein, 100 aa, Hedyotis centranthoides
MAIRLSRVIQAKQLLKRANSFTSKNGSSYDVPKGYCAVYVGDSDEKKRYVIPITYLNQPSFQELLSQAEEEFGYDHPMGGLTIPCREDIFIDLTSRFSRN

SEQ ID NO: 781 - DNA, 533 bp, Helianthus exilis
tcaaaactcatctacacatcatatctttcaccaggaagcgctacttcgattcttatcttcctacaacaacttttgtaagtgagcagcctctagttagcttccttgaaaacatggccatacgtatgccacgcatcattcaagcaagaaaaattctcaaacggtccctctctaatggtagcaccactcctgcatctatggacatccccaaaggctattttgccatttatgttggagaacaagagaagaagcggtttgtggtgtctgtatcactactaagcgaacctacctttcaggagctactgcatcaggcagaagaagagtttgggtacaaccatccaatgggcgggctcacgattccctgtagtgaagatgtattcacagatctggcttctcgtttgggagcattttgacttgtatacatctgtctatatctacaacagttttgtaaacatctaaccagtaggagccatttatagttgtaaatttagatcattgatcctgatgaatgaaatttaatttggatattaaaaaaa

SEQ ID NO: 782 - protein, 99 aa, Helianthus exilis; identical to SEQ ID NO: 778

SEQ ID NO: 783 - DNA, 591 bp, Helianthus exilis
cgcggggatcaatgttgattttgaatgaatcctgaaatactcattgtgcttctctccaataaagttcttagtccctggctctcacatagtatcaatcttcattcgttcatgaggtatacacaaatttcctaaaatcatgtctaataagctggctgttgggagatgccaatcatcttcacgtgtcattgatgtacctaaaggccatttctctgtgtatgttggtgaaaacagcctcaagagatttatcgttcctttagcgtatcttaaacatccttcatttcaaactttgttgaacatgtcggaagaggagtttggctatgctcatccaatgggaggtctgatattcccttgcagagaagatactttcattcagcttgttgagaatatacaattaacatgattgtggtctgataagaaaatatgaccaactttttgcattgtaactgtaaacatttaggagtgtttttttcctttctacatcccttttaatggttatacccagggttattaccaatgaaagtatgagtttgtataaataatactttgctaactagttacaagtttgttataaatttatctatttttaaaggc

SEQ ID NO: 784 - protein, 99 aa, Helianthus exilis
MGIKKSKEVSQAAVLKRMMKRCSSSIGKKDGYDVPKGHFPVYVGVNRSRYIVPISFLAHPEFQQLLRHAEEEFGFHHHMGLTIPCEELVFRSLTASMLR

SEQ ID NO: 785 - DNA, 1055 bp, Helianthus exilis
attatgatttcaagtctcgagtacaattgggaaatgaaacaagataccacaaatgtacaacttacaaaaatagaaagtacaagcagacttgctaaaaatggaaagatcgaaaatacacgatgttacacgtaaccatttcagtccacctcataaccatttcagtccctgtacttacataataaatagattgaaatggttacgaaagtgaaaccacaggaaccgaaatcacaatttttaaacaaatggactgaaatagtgatttttgacaaaccatatagacgaaaacggtaatcaactctttttttataagaccggacagaatattgttgatggtttggtctataaatactctccacacctacccacccactttatcctcttcctcaacatcatcaccagcttaacttctggaacatattaagatgggcataaaaaaatcaaaggaagtctcacaagcagcagtgttgaaacgaatgatgaaaagatgctcctcaagtataggcaaaaaagacggttacgacgtccccaaaggccattttccggtgtacgtgggtgttaaccgaagccgatacatcgttccgatttccttcttagctcaccctgagttccaacaactcctccgtcacgccgaggaggagttcggttttcatcaccacatgggcctcactatcccatgtgaggagctcgttttccgatctctcaccgcctccatgctccgatgacgatgataatagaacaaacactatgctatgctatgtctcagttcctctgcagtagaagacaaatgggattcaaaatgaagctgcgttttgcaatcgctttattttttttttttataaggctcctcactttccactgaaaaagtggatttcctttttttaaccatttttcttcttctttttctactcttaacccaaaatatacgatttaatttattttttgggttggattaatttgtacaaattatatcttgtaattttcctcatttgaggtgtaaattatattgcaccctcttgagagtgactaaatatttctccaatatatttgtggtttct

SEQ ID NO: 786 - protein, 99 aa, Helianthus exilis
MAIRMPRIIQARQILKRSLSNGGSTPASMDIPKGYFAIYVGEQEKKRFVVPVSILSEPRFQELLHQSEQEFGYNHPMGEITIPCSEDVFTDLASRIGAF

SEQ ID NO: 787 - DNA, 620 bp, Helianthus paradoxus
acacatcttcctgaaataatctacatactcattcagaaagaaacgagtctttgaatttttttccgtccattacagtgaacatcctctagcttccttgaatacatggccatccgtatgcctcgtatcattcaaacaaaacaaattctcaaacgatccctctctaatggtggcagcactcccgcatctgtcgatatccccaaaggctattttgccatttatgttggggaacaagagaagaagcggtttgtagtccctgtatcaatattaagcgagcctagatttcaagagttactgcatcagtcagagcaagagtttggatacaaccatcccatgggcgggatcacgataccatgtagtgaagacgtattcaccgatctcgcttctcgttttggagaattttgacttgtgcagatcggcatccttctgacaaaactttgtaaacaacaatacagtagtgagcttttgtagttgtaaagttagatcattgttccagataaactttaattggatattattttgagttcatgatatactaattgttataagaggtggtttagtacacaaataaagctacttagtagccagttataaaagttgaaggggatacttacaaacaaaaa

SEQ ID NO: 788 - protein, 102 aa, Helianthus paradoxus
MTIKKPSTKLSQAAIIKHIMKRCSSIGRKQQQHYDDVPKGHFVVYVGDNRSRYVVPISFLSRPEFQSLFNLAEEEFGFDHDMGLTIPCQEQVFESLTSFLRF

SEQ ID NO: 789 - DNA, 784 bp, Helianthus paradoxus
aggcaagaaacatttgaaagtatcaaagtaagataaagagattcccatgacacaagaataccaacacaatcataactcataaggctcacaagttcttgttataaagtcaataagttgaccatcttttagaaattccctcatacactacactacatataagcatataacattcttcctcaattgtcattattcaaatctctctaaccctttaacctctctttcaattctcccataaacaagatgttgggaaagatgggttcggtcaagagactagccaagaaagtcaaagtgaaagttagaagtgccactgaaccatcgcagcaccacgagcacttgctcaaggaccaagaagaagcatgttcaaccccaacagggtttcttgcactttacataggcgaagagagacgtaggttcgtggttccaaccggctacttgtcgcaccctttgttcaagatgttgttagataaggcctcggatgagttcgggttcgagcaaaagcatggcttggtggttccatgcagtgtcatggctttccaagaggtggtaagtgttgtggaatgctgcaatggcaaatttgatattagtcatcttgttgaagagtttatttagtgtaaataataagtgtgttaaaaagagagaagttgtgatttttgcaactccctttttagggtttgaagatttctatcaggattatcttgttagtatggggttacaaaagaattaatccttcatgcacctgccacacttaatatttagtagatgtgttgatgctagtaattttgac

SEQ ID NO: 790 - protein, 122 aa, Helianthus paradoxus
MLGKMGSVKRLAKKVKVKVRSATEPSQHHEHLLKDQEEACSTPTGFLALYIGEERRRFVVPTGYLSHPLFKMLLDKASDEFGFEQKHGLVVPCSVMAFQEVVSVVECCNGKFDISHLVEEFI

SEQ ID NO: 791 - DNA, 460 bp, Helianthus paradoxus
attacgggcgggcacacatcattcaagcaagaaaaattctcaaacggtccctctctaatgatagcaccactcctgcatctatggacatccccaaaggctattttgccatttatgttggagaacaagagaacaagcggtttgtggtgtctgtatcactactaggcgaacctatgtttcacgagctactgcatcaggcagaagaagagtttggctacaaccatccaatgggcgggctcacgattctctgtagtgaagatgtattcacagatctggcttctcgtttgggagcattttgacttgtatacatttgtctatatctacaacagttttgtaaacatctaaccagtaggaaccatttatagttggaaattttaaatcattgtcccagatgaatgaaatttaatatggatattctcttgagttcatggtattctatatttttataacatggttttatttg

SEQ ID NO: 792 - protein, 99 aa, Helianthus paradoxus
MAIRMPRIIQTKQILKRSLSNGGSTPASVDIPKGYFAIYVGEQEKKRFVVPVSILSEPRFQELLHQSEQEFGYNHPMGGITIPCSEDVFTDLASRFGEF

SEQ ID NO: 793 - DNA, 513 bp, Helianthus petiolaris
tcaaactcatctacacatcatatctttcaccaggaagcgctacttcaattcttatcttccttcaacaacttttgtaagtgagcagcctctagcttcattgaaaacatggccatacgtatgccacgcatcattcaagcaagaaaaattctcaaacggtccctctctaatggtagcaccacccctgcatctatggacatccccaaaggctattttgccatttatgttggagaacaagagaagaagcggtttgtggtgtctgtatcactactaagcgaacctacctttcaggagctactgcatcaggcagaagaagagtttgggtacaaccatccaatgggcgggctcacgattccctgtagtgaagatgtattcacagatctagcttctcgtttgggagcattttgacttgtatatatctacaacagttttgtaaacatctaaccagtaggaaccatttatagttgtaaatttagatgattgatccagatgaatgaaatttaatttgaataccac

SEQ ID NO: 794 - protein, 168 aa, Helianthus petiolaris
MHKIKGFRIKHKFVKLIKWRLHQREKHSDYLRLTRRNITSIAMSKLCGFARSLKKSAQDICFRNSGSSYVRLGEEIKNLVPKGHLAVYVGEKEDNAYRVLVPVVYFNHPLFGDLLREAEKAYGFNYDGGIHVPCRISEFENVQMKISAAGGCGGGDGLRARRSWRLTL

SEQ ID NO: 795 - DNA, 843 bp, Helianthus petiolaris
  misc_feature (46)..(46): n is a, c, g, or t
cgaccgtgtaccgaccactccccacttctctcgccccccacacacncttataaacacacctcaaatcacacttctaaaaacaccccatttcacatcaccaaaatcccacaaaaccctttaaatttcatccaacatgcacaagatcaaaggtttcaggatcaaacacaagtttgtaaagctcatcaaatggagacttcaccaaagagaaaaacattcggattacctacgattaacccgacgcaatatcacgtccatagcgatgtcgaaactttgcgggttcgctcggtctttgaagaaaagtgctcaagacatttgttttaggaattcgggttcaagttatgttcggctcggggaggaaataaagaatttggtcccgaaagggcacttggcggtatacgttggggaaaaagaggacaacgcgtatagggtattggtgcccgtggtatattttaatcatccgttatttggggatttgttaagggaggctgaaaaggcttatgggtttaattatgacggcgggattcatgtcccttgtcgaatatctgaatttgagaacgtgcaaatgaaaattagtgccgcgggtggttgtggcggcggcgatggtctccgtgcacgacggagttggcggcttactttgtgagttgtggtgggaatgtgtcacaagtattcggaattgacacttgagagtgatttggggtcgattgtattttgtttgtctttttttgtagattttttagtcaggttgtacatatctgaactttcttttttattgactaatatttgtcatcgtagtttgttttatttagaaagagaaaatatagcatccgattttaccactaaaaa

SEQ ID NO: 796 - protein, 127 aa, Helianthus petiolaris
MKRLIRRLSRVADSSHYSLLRSDPRFSRRSRTPKSRRSGGVPEGHLPVYVGDEMERFIVSADLLNHPIFISLLNKSAQEYGYEQKGVLRIPCHVLLFERVLEAMRLGQEADYDQLQLQLQLQLLADC

SEQ ID NO: 797 - DNA, 660 bp, Helianthus petiolaris
  misc_feature (656)..(659): n is a, c, g, or t
tctcaactgacaacctaaaccttaaatacctcaacctcaaatctcaatctcaacctcaactatgaagaggctcatccgccgcctctcccgagtggctgactcatcccactactctcttttacgctcagaccctcggttctcccgccgctcacggacccccaaatcccgccgcagcggcggagttcccgagggtcacttacccgtatatgtcggcgatgagatggaacgtttcatcgtcagcgccgacttactcaaccatccaatcttcatcagcttgttaaacaaatcggctcaagaatacggctacgagcaaaaaggcgtgctccgtatcccgtgtcacgtgctcctcttcgagcgggttcttgaagccatgcggctcggtcaagaagccgattacgatcagctccagctccaactccagcttcaacttctcgccgattgttagccgatttttttttttttttaaataggagtagccgcttatttttattaatgtttttatgttttaacatatacgttaacagatcggttttttattaggtctgtacatatcgcttaattaattttcgtgtgtaaatttaattattaaacacgagcctcgttagtgtttttggtggtggttgtttttatttaattagtgcgtaatttaattgaannnna

SEQ ID NO: 798 - protein, 99 aa, Helianthus petiolaris; identical to SEQ ID NO: 778

SEQ ID NO: 799 - DNA, 516 bp, Hedyotis terminalis
gcttcaacacatttaatctttttactactttcttctttcattccgaattagattcatcatcattgaaatggccatccgtctttctcgtgttattcaggctaagcaactcttgaagcgggctaattccttcacatcgaaaaacggttcatcatatgatgttccgaaggggtattgtgccgtatatgttggagatagtgatgagaagaaaagatatgtgatccccattgcttacttgaaccagccctcctttcaggaactgttgagccaagctgaggaagaatttggttacgatcatccaatgggaggcttgacaatcccctgcagagaagacatcttcatcgacctaacttctcgattcagtaggaactaattaattccagtcagccctaattgtctgtaaccagagatgatgaagcaaagttttgtaacttagtatgtaggggaaaaacaagcagagattgctcttgtacattctgttactgattctctcataaattcaacgtttgatcttaactc

SEQ ID NO: 800 - protein, 100 aa, Hedyotis terminalis
MAIRLSRVIQAKQLLKRANSFTSKNGSSYDVPKGYCAVYVGDSDEKKRYVIPIAYLNQPSFQELLSQAEEEFGYDHPMGGLTIPCREDIFIDLTSRFSRN

SEQ ID NO: 801 - DNA, 530 bp, Helianthus tuberosus
cggggaataaactcatctacacatcatatctttcaccaggaagcgctacttcgattcttatcttccttcaacaacttttgtaagtgagcagcctctagcttccttgaaaacatggccatacgtatgccacgcatcattcaagcaagaaaaattctcaaacggtccctctctaatggtagcaccactcctgcatctatggacatccccaaaggctattttgcaatttatgttggagaacaagagaagaagcggtttgtggtgtctgtatcactactaagccaacctacctttcaggagctactgcatcaggcagaagaagagtatgggcacaaccatccaatgggcgggctcacgattccctgtagtgaagacgtattcaaagatctggcttctcgtttgggagcattttgacctgtatacatctgtctatatctacaacagttttgtaaacatctaaccagtaggaaccatttatagttgtaaatttagatcattgatccagatgaatgaaatttaatttggacaaaaaa

SEQ ID NO: 802 - protein, 98 aa, Helianthus tuberosus
MAILMPRIIQAKQILRRSLSNGSNNTYMAIPKGYFAVYVGEQEKKRYVVPVSLLSQPAFQELLNHAEEEFGYNHPMGGLTIPCSEDIFTNLTSRLGAL

SEQ ID NO: 803 - DNA, 857 bp, Helianthus tuberosus
aaccaccgttaacactcaccggaaccctacctttttcaccggaaatggcgattaaaaaatcaaacaaactcccacaagcagcactattgaagcaaatcctcaaaagatgttcaagcttaggcaagaaacatggatatgatgacgatggcctcccactcgacgtcccaaaaggccattttccggtgtatgttggcgttaaccgaacccgatacatcgttccgatttcgttcttaactcacccgggattccaacaacttctccgccatgcggaggaggagttcgggttccatcatgaaatgggcctcactatcccatgcgaagaggtggttttccgatctcttacatccatgatccgatgaattatactagggtttcaccactagggcgcaaccgtagttatgttgagaactgcttaaaccgcataaagcacatacagctttgcatttaaggggtgctactaaaaacactcccttaattgtcaatacaccccttcctcttatgagtgggccccatgtgggaccgatacttttctctcacaagagggtatagttagtaactacggggtgcatttagatcaagccttaagatattgggtaggcagttatgtaactgcattatgtgatttttgaagttctcaacgtattcttggttctgaaattgcaatggttttcacatcactcatcatgcccccatgaacatttttagccgtatggcttctgatccatggttattctccgaccgctcgcctccattctccgatgaaggcttttagggttactccacagttgtttcccgtcaccaaccgccgtgctccggcgagacttaagagaaataggatttttgagatgaaattgcaa

SEQ ID NO: 804 - protein, 153 aa, Helianthus tuberosus
MEDNGGTKLNGIRQIVRLKEIIQRWQHVTLGPKGNDEADNSPPIGNRSGTGINPAISMRLKGYNVYSDSDVEDGCQSPDLPNDVPKGYLAVYVGPELRRFIIPTSYLSDPLFKVLLEKVEEEFGFDHSGGLTIPCEIETFKYLLNCMEHHQKL

SEQ ID NO: 805 - DNA, 990 bp, Helianthus tuberosus
  misc_feature (875)..(875): n is a, c, g, or t
cgcgggacaaaccaccgttaacactcaccggaaccctacttttttcacaggaaatggtgattaaaaaatcaaacaaactcccacaagcagcactattgaagcaaatcctcaaaagatgttcaagcttaggcaagaaacatggatatgatgacgatggcctcccgctcgacgtcccaaaaggccattttccggtgtacgttggcgttaaccgaacccgatacatcgttccgatttcgttcttaactcacccggaattccagcaactcctccgccatgcggaggaggagtttgggttccatcatgaaatgggcctcactatcccatgcgaagaggtggttttccgatctcttacatccatgatccgatgaattatactagggtttcgccactagggcgcaaccgtagttacgttgagaactgcttgaaccgcataaagcacataagttttgcatttaaggggtgctactaaatgcactcccttaattacttaacacaccccctcctcttacgtacttccgagtgggtcccgtgtgggaccggtacgtttctctcataaggggtatagttagtaactacggggatgcatttagatcaagccttaagatattgtgtaagcagttatgtaattgctttctgtatcatacttaatgcaaaggtacaatgcattatgtgattttcgaagttttcaacgtattcttggttctgaaattgcaatggttttcacatcactcatcatgcccccatgaacatttttagccgtatggcttctgatccgtggttattctccgatcgctcacctccgttctccgatgaaggcttttagggttatccacagttgtttccggtcaccaaccgccgtgctccggcgagacttnagaagaataggattttgaagatgaaattgcatattgccatggtgtcttttttaaggctggtttctttttccagagctatagtttccaaatccagagaaaagtaataactctttac

SEQ ID NO: 806 - protein, 104 aa, Helianthus tuberosus
MVIKKSNKLPQAALLKQILKRCSSLGKKHGYDDDGLPLDVPKGHFPVYVGVNRTRYIVPISFLTHPEFQQLLRHAEEEFGFHHEMGLTIPCEEVVFRSLTSMIR

SEQ ID NO: 807 - DNA, 898 bp, Helianthus tuberosus
gagcatttttccttcaatcggcctttagaacgcagcagactctccctcctcgaagaaaatggccattcttatgcctcgaataatccaagcaaaacaaattctccgacgatcattgtcaaatggaagcaacaatacgtacatggccatcccaaaaggctattttgccgtttatgttggggagcaagagaagaagagatatgtggttccggtatcattgttaagccaacctgcatttcaagaattattaaatcatgcagaggaagagtttggttacaaccatcccatgggcggtctcacaattccatgcagtgaagacatattcactaatcttacttctcgtttaggggcattataactagaacatggtggttttacgtttctatcatgtttttgtagaactaaccgataggacctttcggagtttgtaagacggagacaattgtcccaattttatgaagtttgatttggcaattaattatttctttttgatgtgaaaataacgaaacccaactaacaattaactcactagttggacctcactatagacacttaatttcccaagaacaaatgaactaaggttcttatacgagatatagcggaatatgatcaatgaacgcgagagaactaatttctaggcatatgcaacaataaataaccatacaatgcaagataaagcaaggtaagagagacaccgagatttttacgtggaaacccaaattgggaaaaaccacgggcggaggacgccgagaactgattcactatcacttgatggttatacacttgagatgttacaaagcttataacaatgaagaaagaaacacgagaggtgttcttaagctttagcctaaacactaatatatggagatatatattatatgaagaagaaaggctgtttttc

SEQ ID NO: 808 - protein, 104 aa, Helianthus tuberosus
MAIKKSNKLPQAALLKQILKRCSSLGKKHGYDDDGLPLDVPKGHFPVYVGVNRTRYIVPISFLTHPGFQQLLRHAEEEFGFHHEMGLTIPCEEVVFRSLTSMIR

SEQ ID NO: 809 - DNA, 852 bp, Helianthus tuberosus
tgcataggaataaccgaaaaggattccaaaatccagtttcttacccatcacattcctcttttgttcttccttatttgacccattttatacccatcatcagatctctctatttcaggagatagcaaatatggaagacaatggaggaactaaactgaacggtattcgacagattgttcggctcaaagaaatcatccaaagatggcagcatgtgacactggggccgaaagggaacgatgaagcggataacagtcctccgataggcaatcgttcaggcacaggaattaatccggcgataagcatgagattgaaaggctacaatgtgtattctgattcagatgttgaagatggctgccagagccctgatctaccaaatgatgtccctaaagggtacctggcagtttatgtagggcccgagcttcgacggttcatcattccaacgagctatcttagtgatccgttgtttaaggtcttgcttgaaaaggttgaagaagagttcgggtttgatcatagcggcgggcttactattccctgtgagattgagaccttcaaataccttctcaattgcatggaacaccatcaaaagctatgattgaagggataaagaccaacacatcaactgtgcagcttattcttgtggtacgcggatttgacattcttttatctgtgttttcgttcttccctctttcaagtattcaagcggaagagactcgaagatatagttggtagaaaaacttgtggtttcctaggtccagtttaactttgtgatgttaaatttgttgcgttcttggattcttttaacaacatttgaactctagacgtattcatcgtgcaatgcaaactgtgttttactcc

SEQ ID NO: 810 - protein, 99 aa, Helianthus tuberosus
MAIRMPRIIQARKILKRSLSNGSTTPASMDIPKGYFAIYVGEQEKKRFVVSVSLLSQPTFQELLHQAEEEYGHNHPMGGLTIPCSEDVFKDLASRLGAF

SEQ ID NO: 811 - DNA, 772 bp, Lotus japonicus
gaatagttacatatctttatgatcttttcaacatgaacatttcaatcttcctctaagctccatatattttgtaattttatttccacacacacacacaccacacaaaatggatggtattggtaatggtattggtatgatgaagaagagtaagagcaaaaggctgggaaaagctgcagggagtaagaaaggaagcctgattacaaaaacatgggagcgatgcaagtccataggacgaggtacaaccacaaggatcacaaggagcaaatcatggccaagccgtggcaaaagtactactgttgtggccccagaaggttgcttctcggtctatgtggggcaacaaatgcaaaggttcgtgatcaaaactgaatacgtgaaccaccctttgtttaagatgttgcttgaagaagctgagtcagaatatggttatagcagccaaggccctatagtccttccttgcaacgttgatgtgttttacaaggtgttgatggaaatggatgaagaaacgtctactcctgatcagcctcagcctcatggatgtgcttttgtgaaacaacgttctcgctcctcctatcatcttcctagcccttcccgaatgcttgccataaaccacttgtgatttttaatcaaaacttaatgcatgtatctactagagtgatgtttttctttctttcttttctcgatctgtaggttgaaaattaataaacgatcgagtgtgatgatggtttgtcctattcggattttcatatataacttttccactttgtctatctct

SEQ ID NO: 812 - protein, 89 aa, Lotus japonicus
MGFRIPGLIRRASFSTTQASSKGFEVPKGHLAVYVGDEMRRFVIPVSYLNQPSFQELLYQAEEEFGYDHPTGGLKIPCREDDFLNLISQ

SEQ ID NO: 813 - DNA, 496 bp, Lotus japonicus
gttcttgctcatataagtcctcttacattagtatattattttttgtgtagagcaattaaaaacaatgggtttccgcataccaggtcttattagaagggcatcattttctacaacccaagcatcttccaaggggtttgaggtcccaaaaggccatcttgcagtctatgttggagatgaaatgaggcggttcgtgattccagtatcatacttgaaccaaccttcatttcaagagttactatatcaagccgaagaagaatttggatatgatcatccaacaggcggtctcaaaattccatgtagggaggatgatttcctaaacctcatttctcaatagaatgaatgagatgtaaaccatgccaacatagagagatagattagttgaggcaaatttgtatagaatacattttcttctattatgaagattttccattttgtttcttcctcgtttcattgctgtagaagtaaacaactttcacctgaatgagaatacaaaaag

SEQ ID NO: 814 - protein, 169 aa, Lotus japonicus
MDGIGNGIGMMKKSKSKRLGKAAGSKKGSLITKTWERCKSIGRGTTTRITRSKSWPSRGKSTTVVAPEGCFSVYVGQQMQRFVIKTEYVNHPLFKMLLEEAESEYGYSSQGPIVLPCNVDVFYKVLMEMDEETSTPDQPQPHGCAFVKQRSRSSYHLPSPSRMLAINHL

SEQ ID NO: 815 - DNA, 570 bp, Lactuca perennis
cggggatttcctctgtttcctccggatcatcttttaacaaagaaaatactctcacatttttttccttcatcaaccttcagaaaaatgggtattcgtatgcctcggatcattcaagcaaaacaaattctccaaaggtctttgtcaaatggaactcgcacatcaacaatggatctaccaaaagggtattttgcagtttatgttggggagcaagaaaagaagcgttttgtggttcctgtgtccttgttaagccaaccttcatttcaagatttattatataaggcagaggaagagtttggatatgaccatccgttgggtggcctcacaatcccttgtagcgagcacacattctttgatatcgcaactcgtctgggcgcattatgaactcaagttataccattttagttgtaacatctttttttcttagcactaatcactgctctttttgcaacatgtgacgctcatcagttgtccaggttgttttggaattcaaattcggacttcttcggaatccacaccatgtattatttaaagatttaatgtagacttgaatgacaaagaaagttctctata

SEQ ID NO: 816 - protein, 169 aa, Lactuca perennis
MKKFRGFFLKHKVVSLFRCIRRRNQLSSRGYRRLNPSLRSLSKFLKWGARVKAKARSVCSINPPFRSGYFRIGKDSIVDTDHAPPHATIPKGKMAVYVGQDDGGFERVLVPVIYINHPLFGQLLMKAEEEYGHDHPGGITIPCRISEFENVRTRIAAGSGGRKHVPSPW

SEQ ID NO: 817 - DNA, 882 bp, Lactuca perennis
ggggattatttgcattttctctctctctctctctctctctcatcatcatcaaagctacggtgggtctggtttttcacaatttatccatagatcaagcagcctccgaagaaatcataagtatggacacaccaattcattagatcataaggtacgaaaacaactatgtcaaacatacccatcactctttctgaaatttgtctcaccctgttccgtttagccatgtctgttgcagacccatggcccttttcctaaatttcacttctcttcttccaattaccgcttttaacttcgattcttgattgggttttgaatttcgtcaaaaaatgaagaaattccgaggcttttttctcaaacacaaagtcgtctcactattccgatgcatccgccggagaaaccaactgtcgtcgaggggataccgtcggctaaacccatctcttagatcgttgtcaaaattcttgaagtggggtgctcgagttaaggcaaaagcaagatccgtttgctctataaacccaccttttcgttcgggttactttcgtataggaaaagactccattgtggatacggatcatgcgccgccgcacgcgacaattccgaagggaaagatggctgtgtacgtgggacaggacgacggaggtttcgagagggtgttggtgccggtgatatatataaaccatcctttgtttgggcagttgttgatgaaggcggaggaggaatacggtcatgatcatcccggtggtatcacgattccttgccggatttcggagtttgagaacgtgaggactaggattgctgctggaagcggtggccggaaacatgtaccctcaccctggtagtagctgagcaacactgacggcgatatagtttagaaatgtacttttgtct

SEQ ID NO: 818 - protein, 98 aa, Lactuca perennis
MGIRMPRIIQAKQILQRSFSNGTRTSTMDLPKGYFAVYVGEQEKKRFVVPVSLLSQPSFQDLLHQAEEEFGYDHPMGGLTIPCSEHTFFDLATRLGAL

SEQ ID NO: 819 - DNA, 581 bp, Lactuca perennis
tttcctctgtactcctccgcaacatcttttaacacagaaaatactctcacaattttttttccttcatcagctttcagaaaaatgggtattcgtatgcctcggatcattcaagcaaaacaaattctccaaaggtctttctcaaatggaactcgcacatcaacaatggatctaccaaaagggtattttgcagtttatgttggggagcaagaaaagaagcgctttgtggttcctgtgtccttgttaagccaaccatcgtttcaagatttattacatcaggctgaggaagagtttggatatgaccatccaatgggtggcctcacaatcccatgtagcgagcacactttctttgatctcgcaactcgtctgggcgcattatgaactcgagttatagcattatagttgtaaataggttttttgtaaagcactgatcactggcctttttgcaacatgtgacacctctcggttgtccaggttgtttgaaattcgaatttagatttgtttggcatccactttgtattgtttcacgagataaactagacttccatgagtaacaaaattcactatataaagtttttttcaat

SEQ ID NO: 820 - protein, 133 aa, Lactuca perennis
MGSGDKHFLSFNLHLHHHHHHNHVESESMKKDQNSNSTPIPKGCMAVMVGHEGEEQKRFVIPVIYIYHPLFMELLKEAEEEYGFDHRGPINIPCDVQQFCNVEGLIKKDDFFYNYQHHHHHHHHHHHIWCFKA

SEQ ID NO: 821 - DNA, 856 bp, Lactuca perennis
gcgggggctcttcatcacaaaaccaaacaagtaaagctagaaagtcttttgatatcatatatatatgctgccatgagcaacattccaagatctttaacagactcttgcttgtcgagcttcttgcttgcgatttccgcttctgatccttggcctttctctattctttcttcctaaccccggcctcctccatactcaataattcatctatcgtttttgtttctgtagttgtcaactgtttagccgtttggttttgggaattttgatgggtagtggagataagcattttttgagttttaatctgcatctgcatcatcatcatcatcacaatcacgtggagtcggagtccatgaagaaagatcagaacagtaacagtactcctataccaaagggatgtatggctgtaatggtgggtcatgaaggagaagagcaaaagaggttcgtcataccggtaatctacatctaccatccgcttttcatggagctcttgaaggaggctgaggaagaatacggttttgatcaccgcggacccatcaacataccttgtgacgttcaacagttctgcaatgttgaagggttgatcaagaaagacgatttcttttacaactaccaacatcaccaccaccaccaccaccaccaccaccatatctggtgcttcaaggcttgatccagttgcagttgataatgatcgatcggtccacatatatacgaagattgttgttgtttttaagtgttagcgggtgccattatatttgattctataccttatgatttgtatcttagtgttttttttatgtgagagagaaagaaagacggatttggaaagtgtaaatacatgatatgatgtttaattaataaa

SEQ ID NO: 822 - protein, 98 aa, Lactuca perennis
MGIRMPRIIQAKQILQRSLSNGTRTSTMDLPKGYFAVYVGEQEKKRFVVPVSLLSQPSFQDLLYKAEEEFGYDHPLGGLTIPCSEHTFFDIATRLGAL

SEQ ID NO: 823 - DNA, 899 bp, Lactuca saligna
acatcacaacagcttcaatctaattcccacttctatcaatcatttcatcaattctaccaaaaaaagattatcttcttatttcggtcaagaaatatgggtggtttcaggttgcattcattagttgcaaatgcgaaacagcttattaaactgaacaacaacaagcaccttcagcgagatgctcccaaaggatatttagctgtgtacgttggagaaattcaaaggaaacggtttttggttcctttatcgttcttggatcaaccattgtttcaagacttgttgcgtaggtcagaggaggagttcgggttcaaccatccaatgggaggacttaccattccttgccatgaagaagctttcgtccatctcactacccagttacgcactaattcatagtttgaggccggtgaattttcagcctccaaagattttggatcctagaagttcatagacactataatatatagttgaagttgtataaatcggcattcacgttttctttaattgcagtcatcatgtccatacagtacatactgtaactattgttaatgtttttgccctaggaatgaatcacactgccaacagacatttggcctagcagtaagaagtgatactctcaaactacactgccaacagacatttggcctagcagtaagaagtgatactctcaaacgagaagttacaggttctaatcttattaggagacacaagtggttttaggaatatatgttaatttgcagttaaaaaaaaggaatgaatgatcagactgaactcgtagatggtccgaattaattgattaaagaactctttgaactctatttggctagtggtgggagatttcatgaagtaaggagtatggatgatagaatgtcgtgtttctagagtgtttctggctagctcaaatc

SEQ ID NO: 824 - protein, 103 aa, Lactuca saligna
MGLRKSNNKQTQALALKKIIKRCSSSGKNSDDNCLPNDVPKGHFVVYIGERRSRYIVPISCLDHPTFQDLLQRSEEEFGFNHESGIIIPCQEVDFLSFFSMIA

SEQ ID NO: 825 - DNA, 387 bp, Lactuca saligna
cattacggccggggaaccaccaccacagcaaccacaaacaccaccatcggcgctaccagaacctccataacaatgggtctcaggaagtcgaacaataaacaaactcaagcattagctctcaagaaaatcatcaaaaggtgctcaagttctggcaagaacagtgatgacaattgccttccaaacgacgtcccaaaaggacattttgtggtatacataggagaaaggcgaagcagatacatcgtaccaatatcatgcttggatcatcctacgtttcaagacctactacaaagatctgaagaagaatttggattcaatcatgaatctggcataatcattccttgccaagaagttgattttttgtcatttttctctatgattgcatgaaag

SEQ ID NO: 826 - protein, 167 aa, Lactuca saligna
MKQIQGFRIRLKLVKAFKWVTHERKTHPRYSKLKPTNCRDKAIARLCKLGRSLKRSLKELCCSKPGSDYARIGVGISGEKKPVPRGHLAVYFGEEEDDAHRVLVPVIYFNHPFFGELLREAEKVYGFDHRGGIHVPCRISEFENVQMRISTAGGCGGRSGRSWRSWL

SEQ ID NO: 827 - DNA, 785 bp, Lactuca saligna
tccagttattcctcaaccaacaacattatcgattcccaaattctaaacactcccacaaactctttataagtctttcgatcttatcaagtttcaaggcgatgaaacagattcaagggttcagaattcgactgaagctcgttaaagccttcaaatgggtaactcatgaaagaaagacgcatcccagatacagtaaactaaaaccaacaaactgtagagataaagcaatagcaaggctctgtaaattaggccggagtttgaagaggagtctgaaggagctttgctgttcgaaacccggttcagattatgctcggatcggagtgggaatctccggtgagaaaaaaccggtgccgagagggcatttggcggtgtactttggtgaagaagaagacgacgcgcatagggttttggtgccggtgatatattttaatcacccgttttttggcgaactgttgagagaagctgagaaggtttacgggtttgatcaccgcggtggtattcatgtaccctgccggatatcggagttcgagaatgtacaaatgaggatttctaccgccggtggttgtggtggaagaagcggacgttcatggcggagctggttgtaactcatgggctgctactataccttttttttctttgctgccaactttttacggcaatcttgtatcctcttaaacttatctaaaaaagaaaagaataagtttttgggattttgttgatcttttttttcttccctgttttatgactttatccttaattggttatatatcacttttgtaaatagaatt

SEQ ID NO: 828 - protein, 98 aa, Lactuca saligna
MGGFRLHSLVANAKQLIKLNNNKHLQRDAPKGYLAVYVGEIQRKRFLVPLSFLDQPLFQDLLRRSEEEFGFNHPMGGLTIPCHEEAFVHLTTQLRTNS

SEQ ID NO: 829 - DNA, 831 bp, Lactuca saligna
gggggctcttcatcacaaaaccaacaagaaaagctagaaactcttttgagatcatatatacatatatatgctgccatgagcaacattccaagatctttaacagactcttgcttgacgagcttcttgcttgcgatttccgcttctgatccttggcctttctctatcctttcttcctaaccccggcctcatccatactcaattcatttttcgctttttgtttgtagttgtcaattgtttagtcgtttggttttggaaattttgatgggtagtggagataagcattttttgagttttcatctacatctgcatcatcatcatcatcatcatcatcatcgtaatcaagaggagtcggagtccatgaagaaagatcagaatatgaatagcagtactcctataccaaagggatgtatggctgtaatggtgggtcatgaaggagaagagcaaaagaggttcgtcatacctgtaatctacatctatcatccgcttttcatggagctcttgaaggaggctgaggaagaatacggttttgatcaccgtggacccatcaacataccttgtgacgttcaacagttctgcaatgttgaagggttgatcaagaaagacgatttcttttacaactaccaacatcaccaccaccaccaccatcaccaccaccaccaccatatctggtgcttcaaagcttgatccggttgcagtttgatcatgatcgatcgatccacacttatatatgaagattgttgttgatcttaagttttagctagcggatgcaactatgtttgattgtataccatatgatttgtaattttttttttttttggatgtgagaaaaaa

SEQ ID NO: 830 - protein, 140 aa, Lactuca saligna
MGSGDKHFLSFHLHLHHHHHHHHHRNQEESESMKKDQNMNSSTPIPKGCMAVMVGHEGEEQKRFVIPVIYIYHPLFMELLKEAEEEYGFDHRGPINIPCDVQQFCNVEGLIKKDDFFYNYQHHHHHHHHHHHHHIWCFKA

SEQ ID NO: 831 - DNA, 600 bp, Lactuca saligna
gcggggatcatcacaacagcttcaatctaatttccacttctatcaatcaattcattctatcaaaaatattattttacaagtatgggtgttttcaggttgcattcattagttgcaaatgcgaaacaacttattaaactgaacaacaacaagcaccttcagcgagatgctcccaaaggatatttagctgtgtacgttggagaaattcaaaggaaacggtttttggttcctttatcgttcttggatcaaccattgtttcaagacttgttgcgtaggtcagaggaggagttcgggttccaccatccaatgggaggacttaccattccttgccatgaagaagctttcgtccatctcactacccagttacgcactatttcatagttactttgaggccaaaggattgtcatcctctcaagatttttgatgcacggttttgtagacagtatatagtggcaatgtcctgtatatatgttccaattcaccatgttcatatatactgcagcttctgaatgtcataactacgcatatggaagcatcggatatctttcaaatatctgttaattatttaattcaaataaaatatagaatatacaattcttttct

SEQ ID NO: 832 - protein, 98 aa, Lactuca saligna
MGVFRLHSLVANAKQLIKLNNNKHLQRDAPKGYLAVYVGEIQRKRFLVPLSFLDQPLFQDLLRRSEEEFGFHHPMGGLTIPCHEEAFVHLTTQLRTIS

SEQ ID NO: 833 - DNA, 960 bp, Lactuca sativa
gaaattgagggtatgaacgaaaatgaaaacgagaacgacaagtaatgggagggagtagtgagaaatcagattacgtccggggctcttcatcacaaaaccaacaagaaaagctagaaactcttttgagatcatatatacttatatatgctgccatgagcaacattccaagatctttaacagactcttgcttgacgagcttcttgcttgcgatttccgcttctgatccttggcctttctctatcctttcttcctaaccccggcttcctccacactgaattcattcctcgctttttgtttgtagttgtcaattgtttagtcgtttggttttggaaattttgatgggtagtggagataagcattttttgagttttcatctgcatctgcatcatcatcatcatcatcatcatcatcgtaatcacgaggagtcggagtccatgaagaaagatcagaatatgaataacagtactcctataccaaagggatatatggctgtaatggtgggtcatgaaggagaagagcaaaagaggttcgttataccggtaatctacatctatcatccgcttttcatggagctcttgaaggaggctgaggaagaatacggttttgatcaccgtggacccatcaacataccttgtgacgttcaacagttctgcaatgttgaagggttgatcaagaaagacgatttcttttacaactaccaacatcaccaccaccaccaccatcaccaccaccaccaccatatctggtgcttcaaagcttgatccagttgcagtttgatcatgattgatcgatccacacttatatatgaagattgttgttgattttaagttttagcgggtgcaactatgtttgattgtataccatatgatttgtattttttttttttggatgtgagaaaaaaaaaagagaaagaaagagacggatatggaaagtgtaaatacatgatatgatgtttaataa

SEQ ID NO: 834 - protein, 96 aa, Lactuca sativa
MAILFPRIIQAKQILRRSLSNGNKSMEIPKGYLAIYVGEEEKKRFVVPVWLLSQPAFQELLDQAEQEFGYVHQMGGLTIPCSEYTFSDIASQLGAL

SEQ ID NO: 835 - DNA, 587 bp, Lactuca sativa
  misc_feature (587)..(587): n is a, c, g, or t
cggggacacaacttcctctgaatccttcataacttttcaccaagaagacgtgcatgctttgagagtttccatcctcaatccggcttttgaagtgaacagaaactacctccttaaaaatggccatcctttttcctcggatcattcaagctaaacaaattctcagaagatcattatccaatggaaacaaatctatggaaatcccaaaaggctatttagcaatttatgttggtgaggaagagaagaagcgatttgtggttcctgtatggttgttaagccaacctgcatttcaagaattattagatcaggcagagcaagaatttgggtatgttcatcaaatgggcggcctcacaattccatgcagtgaatatacattcagtgatattgcttctcagttgggcgcattatgacttccttacagaatttttacaaccaactaaccactaggttctttttatcatttgtaattaaatcaagacaattttcctagttgtatgaaatcggatcaaggaacagttttgagttcattataaaattttcattgtatgaatgagaaactaattttaccattgactattttcgaaatgtgn

SEQ ID NO: 836 - protein, 167 aa, Lactuca sativa
MDENLGTKLTGIRQIVRLKEIIQRWQHVTLGARGNDNDDDADNNSPMTIGNHPGGGINPAITMRLKGYSVYSDSDIEDGCQSPDPPNDVPRGYLAVYVGPELRRFIIPTSYLSDPLFKVLLQKVEEEFGFDHSGGLTIPCEIETFKYLLNCMEHHQKDHLEHNQATI

SEQ ID NO: 837 - DNA, 754 bp, Lactuca sativa
ccgtaaaaccacacaattcaaacctcaccctctccaactccgacgtcgaaatgtcaccggccatcggaacatcaagcagaatccgccacattgttagagtcagacagatgctatgtcgttggcgtagaagagccacctcttcatcatcatcttctcgaagattgatggcaagcgatgtgccggcgggacatgtcgcgatctgcgtcggtagtagttgccggaggtttatcgtgagagcaacctacctgaaccaccctatgttccagaagcttctaagggaagccgaagaagaatacggcttctgtaacaaaggtccattaacgataccttgtgaggagtccgagttcgaagagatcctccgcttcgtttcccggccggaactttataccaataacaaatcaagccggttcgtcaatctcgaagaatttcagagattttgtcacgtaagttacgtagcggaatctaagccgctgcttcatggatctgtgtactaaaagctgctggtgagtccggaactgagttgaaccgagtttcatactcctaaatctaactactattctgatttttaaagactagaagtagtttagagactttcttttgttgttgtctatttcacccttttctgtgtaaaatctgggtgaagtagaatcgatttgggtgttttttgcttggtggattgggaagatgagttgtaaataaactctggccgaatcgttccgagttgttccgagttgaatggaaacaaattgaattc

SEQ ID NO: 838 - protein, 147 aa, Lactuca sativa
MSPAIGTSSRIRHIVRVRQMLCRWRRRATSSSSSSRRLMASDVPAGHVAICVGSSCRRFIVRATYLNHPMFQKLLREAEEEYGFCNKGPLTIPCEESEFEEILRFVSRPELYTNNKSSRFVNLEEFQRFCHVSYVAESKPLLHGSVY

SEQ ID NO: 839 - DNA, 765 bp, Lactuca sativa
gagatcttaggattacaagaatggatgaaaatttaggaaccaaactgaccggcatccgacagattgttaggcttaaagaaattatccaaagatggcagcatgtgacacttggggcaagaggaaatgataatgatgatgatgctgataacaattctccgatgactattggtaatcatccaggtggaggaattaatccagcaataaccatgaggttgaagggatactctgtttattctgattcagacattgaagacggatgccagagtcctgatccaccaaacgatgtgcccagaggatatttggcagtctatgtaggccctgagcttcggaggttcatcattccgacaagctatcttagtgatccactcttcaaagttcttctgcaaaaagttgaagaggaatttggatttgatcatagtggtggcctcaccatcccttgcgagattgaaaccttcaaataccttctcaattgcatggaacatcatcagaaggatcaccttgaacacaatcaagctaccatttgagggtcaaagaccaaatatcaactgtgtaagtaacgattggatgcagcttattcttgtggtaaaaacccaaaaggaagtttctattggtatgatgatttgacattcttttatctgtatttttgctcttctctctttcaaatattcaaatgtaagagagtggcagttatagttcatagaaagcttatgtttctaggtgtgtttgttcatttttcttgtcattggatgtgtaatagtaatacat

SEQ ID NO: 840 - protein, 144 aa, Lactuca sativa
MSPAIEKSSRIHHIVRVRQMLRRWRRRSSSSSRRCIASDVPAGHVAICVGINCRRFIVRATYLNHPIFQKLLMDAEEEYGFTNIGPLTIPCEESEFEEILRFISRPELGNNKKPSRHVNLEDFQRCCHVDYVGESKPLLHGSVY

SEQ ID NO: 841 - DNA, 765 bp, Lactuca sativa
ctcatacacaactacacccaaaaaacgaaacgctccctccgactccgacgtcaagatgtcaccggcgatcgagaagtcaagcaggatccaccacattgtcagagtccgacagatgctccgccgttggcgccgtcgatcctcttcatcttcacggcggtgcatcgcaagtgatgtgccggctgggcacgtagcgatctgcgtcggaatcaattgcagaaggtttatcgtgcgagcgacgtacttgaatcatccgattttccaaaagcttctgatggatgccgaagaagaatacggtttcacgaacatcggtccgttgacgattccgtgtgaagaatcggagttcgaagagatcctccggttcatatctcgaccggaactcggtaacaacaaaaaaccgagccgtcacgtaaatctcgaggattttcagaggtgctgccacgtggattacgtaggtgaatctaagccgctcctccatggatcagtgtattagaatgtaaaactgaaatatacgtagcgagttagtaactgagtcaactcggtttgagtttgataatctaactactattctaaattttttccagagtagaagtagttaggattagtttcaaatacttttcacctgtgttgtgtgtgattgttttttgtttgggagattggcgaagatgagttgtaacttgactcagtccgagtcgtcccgagttgaaaaaagtagatgacattaattggacattattactttgttacttttaaatcttaattatttta

SEQ ID NO: 842 - protein, 140 aa, Lactuca sativa
MGSGDKHFLSFHLHLHHHHHHHHHRNHEESESMKKDQNMNNSTPIPKGYMAVMVGHEGEEQKRFVIPVIYIYHPLFMELLKEAEEEYGFDHRGPINIPCDVQQFCNVEGLIKKDDFFYNYQHHHHHHHHHHHHHIWCFKA

SEQ ID NO: 843 - DNA, 537 bp, Lactuca serriola
aaccacaacttcctctgaaatccttggcatcttttcaccaagaagacgtgcatgctgtgagagtatccatcctcaatcaggcttttgaagtgaacagaaactaccatccttaaaaatggccatcctttttcctcggatcattcaagcaaaacaaattctcagaagatcattatccaacggaaacagcacaaccaaatctatggaaaccccaaaaggctatttagcaatttatgttggtgagcaagagaagaagcggtttgtggttcctgtatggttgttaagccaacctgcatttcaagaactattagatcaggcagagcaagaatttgggtatgttcatcaaatgggcggcctcacaattccatgcagtgaatatacattcagtgatattgcttctcagttaggcgcgttatgacttctatacaacattcttacaaccaactaaccactaggttttttttattattattatttgtaattaaatcgagacaatttttccactcgtatgaaatcagatcaaggagcaattttgagttc

SEQ ID NO: 844 - protein, 103 aa, Lactuca serriola
MGLRKSNNKQTQALALKKIIKRCSSFGKNSDDNSLPNDVPKGHFVVYIGERRSRYIVPISCLDHPTFQDLLQRSEEEFGFNHESGIIIPCQEVDFLSFFSMIA

SEQ ID NO: 845 - DNA, 922 bp, Lactuca serriola
cagatcacctgctatacacacacacacattctctctctctcacatcgccatggatatctatttgtgacgaaactgaagaacaatacgagtagatttatgattcttattatctacatcaaagcatacggtagagctcctttatgcgtataacaaccaccgtgcgcgatctagaacctacttctcgttttgtttcttgtagccatgtctgtggtagacccttggccgttgttttgagaaaccaaccgatttactgtaatttttatacaaaatcttcaacttcgcacggaaagaaactcgaagtttgatctggttagttgaatttctcgtaaaaaggatgaaaattagagggtttttgatcaaacatagagtcagttcactttttcggcgagtttaccggagaactcaatcgtcggcaggttacagacggctagatcggtcaccgaggtgtatgtcaaatttgttgaagtggggtgctcggctcaagacgaaaacaatagctttgtgttccaaaaaatccgatctgcctcggaatccagttcttgcaaagtttatagagccgccgcgggcggcggtgccgaaagggaaaatggcggtgtatgtcggtcagaaagatggagacttcaagagagtgttggtgccggtgatatatataaaccacccgttgtttggtcaactgttgagggaggcggaggaggagtatggccacgaccaccccggcgggattaccataccttgtcggttttcggactttgagaacgtgaatactcggatcgccgccgcatgcggtttccggaaaatgatgacgtggaagcgtcgttcatgatgatgatgatgataaatataggaccattttaggttttttctatatctttgagagcttttttagagtgaaagaggcaaagagctgtattgattgtatatt

SEQ ID NO: 846 - protein, 162 aa, Lactuca serriola
MKIRGFLIKHRVSSLFRRVYRRTQSSAGYRRLDRSPRCMSNLLKWGARLKTKTIALCSKKSDLPRNPVLAKFIEPPRAAVPKGKMAVYVGQKDGDFKRVLVPVIYINHPLFGQLLREAEEEYGHDHPGGITIPCRFSDFENVNTRIAAACGFRKMMTWKRRS

SEQ ID NO: 847 - DNA, 782 bp, Lactuca serriola
gcggggacaacacattatcgattcccaaattctaaacactcccacaaagtctttataagtctttcgatcttatcaagtttcaaggcgatgaaacagattcaagggttcagaattcgactgaagctcgttaaagccttcaaatgggtaactcatgaaagaaagacgcattccagatacagtaaactaaaaccaacaaactgtagagataaagcaatagcaaggctctgcaaattaggccggagtttgaagaggactcttaaggagctttgctgttcgaaacccggttcagattatgctcggatcggagtgggaatctccggtgagaaaaaaccggtgccgagagggcatttggcggtgtactttggtgaagaagaagacgatgcgcatagggttttggtgccggtgatatattttaatcacccgttttttggcgaactgttgagagaaactgagaaggtttacgggtttgatcatcgtggtggcattcatgtaccctgccggatatcggagttcgagaatgtacaaatgaggatttgttccgccggtggttgtggtggaagacgcggccgttcatggcggagctggttgtaactcatgggctgctaccttttttttctttgctgccaactttttacggctatcttctatcctcttaaacttatctgaaaaagaaaagaataagtttctgggattctgttgatcttttttttcttccttctttttatgattttatccttggttctcactttgtaaatagaatttcaattttatactttcttgaa

SEQ ID NO: 848 - protein, 167 aa, Lactuca serriola
MKQIQGFRIRLKLVKAFKWVTHERKTHSRYSKLKPTNCRDKAIARLCKLGRSLKRTLKELCCSKPGSDYARIGVGISGEKKPVPRGHLAVYFGEEEDDAHRVLVPVIYFNHPFFGELLRETEKVYGFDHRGGIHVPCRISEFENVQMRICSAGGCGGRRGRSWRSWL

SEQ ID NO: 849 - DNA, 581 bp, Lactuca serriola
acaaccgcaaccaccaccacagcaaccacaaacaccaccatcagcgctaccagaacctccataacgtaacaatgggtctcaggaagtcgaacaataaacaaactcaagcattagctctcaagaaaatcatcaaaaggtgctcaagttttggcaagaacagtgatgacaatagccttccaaacgatgtcccaaaaggacattttgtggtatacataggagaaaggcgaagcagatacatcgtaccaatatcatgtttggatcatccaacgtttcaagacctactacaaagatctgaagaagaatttggattcaatcatgaatcaggcataatcattccttgccaagaagttgattttttgtcatttttctccatgattgcatgaaagaaaaaaagaaaaccatagattcttcccattttgtgaagaaatttcgtttttggtgaacctctttatatttttctcaagtggtgtgtgtgtgtttcaatacccttggaaagatatgtttcaaattttgtacaaaatggaaagtttctgcatgggagatgatttttccctcatgcatttaatacgatgaccattgct

SEQ ID NO: 850 - protein, 99 aa, Lactuca serriola
MAILFPRIIQAKQILRRSLSNGNSTTKSMETPKGYLAIYVGEQEKKRFVVPVWLLSQPAFQELLDQAEQEFGYVHQMGGLTIPCSEYTFSDIASQLGAL

SEQ ID NO: 851 - DNA, 402 bp, Linum usitatissimum
gagagagtaaaaccaacaacaatggggattaggaagccaaccagcaagccctcacaagcaacagtgctgaagcagatcctcaagagatgctcaagcttaggcaagaacaacaacaacaatcatcaagaacattggttccctcctgttgatgtccccaaaggccactttgcagtctatgttggtgagaacaggagtaggtacattgtccctatctccttcctaacccaccccgagttccagttcctactcagcagggctgaggaagagttcggtttcgaccacgacatgggcctcaccatcccttgcgaggaggtcgttttccgctccctcacttccatgctcagatgaatgaaaccccgcaacccgattaacccaccaggtcgatcaacttcgacgcagcga

SEQ ID NO: 852 - protein, 108 aa, Linum usitatissimum
MGIRKPTSKPSQATVLKQILKRCSSLGKNNNNNHQEHWFPPVDVPKGHFAVYVGENRSRYIVPISFLTHPEFQFLLSRAEEEFGFDHDMGLTIPCEEVVFRSLTSMLR

SEQ ID NO: 853 - DNA, 575 bp, Lactuca virosa
gttcctgtcattctttcagagcatagtcatcttcattctccagtccaaagatatgactaattttaggctgcattctttagttgctaattcaaaacaaatgatcagactgcacaacaaacaccaaccagacgttcctagaggatatttggctgtgtacgttggagaaatccaaaagaagcgatttgtggttcctttatcttacttggatcaaccattgtttcaagatttgctacgtaggtcagaggaagaatatgggttcaactatccgatgggaggacttaccattccatgccaagaaaaggcctttattgatctcaccgccctattacaaatttcatagtttcaggacaaagatttgtcatcctcctacatttttcgcaccaagtgttcgttcaatcttttttatgatcagatgtaataggctggttgtaaattcttttcaaatttgccataggctatcattgatttctttttgccggtaacggtataccactggtcaaatttccatgtgacacgtgccttgtaaaaaaacattagctaaatacaatgtttttagtgtagttttcagttaaaac

SEQ ID NO: 854 - protein, 167 aa, Lactuca virosa
MKQIQGFRIRLKLVKAFKWVTHERKTHSRYSKLKPTNCRDKAIARLCKLGRSLKRSLKELCCSKPGSYYARIGVGISGEKKPVPRGHLAVYFGEEEDDAHRVLVPVIYFNHPFFGELLRETEKVYGFDHRGGIHVPCRISEFENVQMRICSAGGCGGRSGRSWRRWL

SEQ ID NO: 855 - DNA, 665 bp, Lactuca virosa
gcggggcatccaccgcttcaaaaaacatcacaacagcttcaatctaatttccacttctatcaatcatttcattaattctaccaaaaagattatcttcttctttcggtcaagaaatatgggtgttttcaggttgcattcattagttgcaaatgcgaaacagattattaaactgaacaacaacaacaagaagcaccttcagcgagatgctcccaaaggatatttggctgtgtacgttggagaaactcaaaggaaacggtttttggttcctttatcgttcttggatcaaccattgtttcaagacttgttacgtaggtcagaggaggagttcgggttcaaccatccaatgggaggacttaccattccttgccatgaagaagctttcgtccatctcactacccagttacgcactatttcatagttatttgaggccaaagaattgtcatcctctgaagattttggatgctagatttagttgtagtgcttttgtcttcagttcatagacactataatatatagttgaagttgtataaatcggcattcacgttttctttaattgcatataaattagtaatttcctctatatatgttacagtcaccatgtccatacagtactatactgtagctattgttaatgtttatgcccaaggaatgaatcagactgaacc

SEQ ID NO: 856 - protein, 95 aa, Lactuca virosa
MTNFRLHSLVANSKQMIRLHNKHQPDVPRGYLAVYVGEIQKKRFVVPLSYLDQPLFQDLLRRSEEEYGFNYPMGGLTIPCQEKAFIDLTALLQIS

SEQ ID NO: 857 - DNA, 861 bp, Lactuca virosa
ttagacctccatgatcataggttcaatgtcaacagcttcatttatgttcaacacggccattaaaattcagccaggaacaaggtctatgtttgatatggcctacgacagaggatagctagcttgatttccacataggaacatatcatagttccacccaagctaaactctagtttctcctttttttttctttttttttttattccttaatcccgattttagtatatacgaagtgatggaaacaatcaagggaaatacgggaaagaataactttctcgtgaagacatggaagcgatgtcgatccttctcccacatccacagcagcaagggcagcgttggcaggttaccgaagagcagatcatggagcggcaaggagacgatgaagaagaaaatagcaccgggagggttttttccggtgtgtgtcggacctgataaacaaaggttcgccgtgaaaacaaagtatgcaagtcatcctttgttcgcgatgcttctggaggatgcagaaaaggaatacgggtaccactgtgatggcccgatatcactttcatgcgatgtggatctgttctacaaggtgttggcggagatggaggcaaaagatgtgcagccgttgggaaggagttatgcgttcgggtcatgcagtccgtttaatcctagccgtcaattgggaagcaacggtgcagctcagatggctaaactagggtatggttattatggacctctaagcctacaagctcgattacgatgagttaacccagtttatgaaagttgtataaattcgcatcttatgtttacgtatacttaagttaactataagcgatgtatgaacaaacccggttgcatgtaatatatatttgtgattttcct

SEQ ID NO: 858 - protein, 180 aa, Lactuca virosa
MHLIFIFISSNMNKIKGFRIRHKFVKLVKWGLHRRRKESNYIRLNPPNNHTVKAMSKLYGFARSLKKSAKDICLRKSGSSYNRIGEEELNPVPKGHLAVYVGEKEDDAHRVLVPVIYFNHPLFGELLREAEKVYGFNYDGGIHVPCRISEFQNVQTEINAAGGCGGCDGFRARRSWRLTL

SEQ ID NO: 859 - DNA, 774 bp, Lactuca virosa
cgggggcatgcatcttatcttcattttcatttcttcaaatatgaacaaaatcaaaggttttagaattagacacaagttcgtaaagctcgtcaaatggggacttcaccggagacgaaaagaatcaaattacataagactgaacccacccaataatcacacagtcaaagccatgtcgaagctctacggattcgctcgctctttgaagaaaagcgccaaagatatctgcttacgaaagtctggttccagttacaatcggatcggagaagaagaactgaacccagttccaaaagggcacttggcagtgtacgttggtgaaaaagaagacgatgcgcatagggttttggtgcctgtgatttactttaatcatccgttgtttggtgagttgttaagagaagctgaaaaggtttatgggtttaattatgatggtgggattcatgtaccctgccggatttcggagttccagaacgtacagaccgagattaacgccgccgggggttgtggtggctgcgatggattccgtgcacgacggagctggcggcttactttatgattggatttggtggtgtgaatgtgtttaaaacccaatctcagagtgtgatttgtggtttgctaaattcgattgttttctactgttttcaactattttttagattttcttttttgccacttgtaaatatattctgaattttgtttttcatttcatagagatagaataatactcaccaaatgttgttgtagtagaaaatatgaaatagataacattatacttcgaaa

SEQ ID NO: 860 - protein, 100 aa, Lactuca virosa
MGVFRLHSLVANAKQIIKLNNNNKKHLQRDAPKGYLAVYVGETQRKRFLVPLSFLDQPLFQDLLRRSEEEFGFNHPMGGLTIPCHEEAFVHLTTQLRTIS

SEQ ID NO: 861 - DNA, 772 bp, Lactuca virosa
  misc_feature (747)..(747): n is a, c, g, or t
cattatcgattcccaaattctaaacactcccacaaactctttataagtctttcgatcttatcaagtttcaaggcgatgaaacagattcaagggttcagaattcgactgaagctcgttaaagccttcaaatgggtaactcacgaaagaaaaacgcattctagatacagtaaactaaaaccaacaaactgtagagataaagcaatagcaaggctctgcaaattaggccggagtttgaagaggagtctgaaggagctttgctgttcgaaacccggttcatattatgctcggatcggagtgggaatctccggtgagaaaaaaccggtgccgagagggcatttggcggtgtactttggtgaagaagaagacgatgcgcatagggttttggtgccggtgatatattttaatcacccgttttttggcgaactgttgagagaaactgagaaggtttacgggtttgatcatcgtggtggcattcatgtaccctgccggatatcggagttcgagaatgtacaaatgaggatttgttccgccggtggttgtggtggaagaagcggccgttcatggcggaggtggttgtagctcatgggctactactacctttacctttttttctttgctgccaactttttacggcaatcttgtatcctcttaaacttatctaaaaaagaaaagaataagtttttgggattttgttgatctttttttcttccttctttttatgattttatccttggttctcactttgtnaatagaatttcaattttatactttc

SEQ ID NO: 862 - protein, 169 aa, Lactuca virosa
METIKGNTGKNNFLVKTWKRCRSFSHIHSSKGSVGRLPKSRSWSGKETMKKKIAPGGFFPVCVGPDKQRFAVKTKYASHPLFAMLLEDAEKEYGYHCDGPISLSCDVDLFYKVLAEMEAKDVQPLGRSYAFGSCSPFNPSRQLGSNGAAQMAKLGYGYYGPLSLQARLR

SEQ ID NO: 863 - DNA, 601 bp, Malus x domestica
cacgaggctcaagtctaattttccttgtttcacaagttcattgacatcttcttcaagtttttgtaaactcgattaccagtctttcctctcaagataataatggggttccgtcttccatctgtaattcctgctaagaaacttcttcgacggtctttttcaaattcaagtcaacaagtttcgtataatttagcagacgtcccaaaaggttattttccagtttatgttggcaagagtgagaagcagcggtttgttgttcctatatccatcctcaaccagccttcatttcaagacttgctaagtgaggctgaagaagaattcggatatgatcacccaatgggcggtgtaacgattccctgcagacaagatacattccttgatctcatttcccgcttgagtgctttgtgagactggatgcataatggagaacaattacatgaactctgtgattgtcacaattttgtacattggaaaagttccacatcttgtacattttctttcgacccaggaggaagaattattgtccccttgggatcagattatgtaaatgtagactgtagcaatattcatatgttctttacaataaagaattattgtccccctg

SEQ ID NO: 864 - protein, 101 aa, Malus x domestica
MGFRLPSVIPAKKLLQRSLSNSSQGASNNLADVPKGYFPVYVGESEKQRFVVPISILNQPAFQDLLSAAEEEFGFDHPMGGLTIPCRQDAFLDLISSLKAL

SEQ ID NO: 865 - DNA, 465 bp, Malus x domestica
tgctaagaaactttttcagcgatctttttcaaattcaagtcaaggagcgtcatataatttagcagatgtccctaaaggttattttccagtttatgttggcgagagtgagaagcagcggttcgttgttcctatatcattcctcaaccaccctgcatttcaagacttgctgagtgacgctgaggaggaattcggatttgatcacccaatgggcggtctaacagtcccctgcagacaagatgccttccttgatcttatttgtcgcttgaaagcattgtgagattggataatggagaacgattacatgaactcgtctctgtgattgtcacaattttgtgcaatggaatatttacacatttttttccgattgaggagggagaattattgtcaccccagatcggattatgcatgtaaatgtagactttagcaatattcattgcttctttacaatatagaaaaacattcctt

SEQ ID NO: 866 - protein, 101 aa, Malus x domestica
MGFRLPAVLPAKKLLRRSFSNTTRGASTNLVDVPKGYFAVYVGENEKQRYVIPVSFLNEPEFQDLVSQAEEEFGFDHPMGGLTIPCRQDAFLHLTSRLNTL

SEQ ID NO: 867 - DNA, 569 bp, Malus x domestica
atcaagcatatagctttcttgttttgcagttgctagttccttgagatcttcaagtttttataaactcgattgctagtctttcctccaaagtttttctacaatggggttccgcctgcctgctgtaattcctgctaagaaactttttcgacggtctttttcaaattcaagtcaaggagcttcatataatttagcggatgtccctaaaggttattttgcagtttatgttggtgagagtgagaagcaacgatttgtggttcccatatctttcctctgccagcctggatttcaacacttgctaagtgaagctgaataagaatttgggtttgatcatccaatgggttgtctaacaattccctgcagacaagatgctttccttgatctcgtatcttgcttgagtgcagtgtgatagagtggtggactgtggagagcaattacacgaactgtgtgattgttacaattttgtaaaccaaacaatttccagattttgtacatttttttcgatcgaggagggagacacatactgttccccttgaatcacaactgtagcaatattcctagctttttacatt

SEQ ID NO: 868 - protein, 91 aa, Malus x domestica
MGFRLPGILLAKKSQVSSKSLDVPKGYLAIYVGESQKKRFIIPVSYLNQPSFQDLLSLSEDEFGYDHPMGGITIPCSEDTFLGLTSALVYK

SEQ ID NO: 869 - DNA, 602 bp, Malus x domestica
agtatacaacatcacgtttaattttccttgtttcacaagttccttgagatcttccagtttatttaaactcaattaccagtcttctctcaagattcacaacaatggggttccgtcttccagctataattcctgctaagaaacttcttcgactgtctttctcaaattcaagtcaaggagctttgtataatttagcagatgtcccaaaaggttattttccagtttatgttggcgagagtgagaagcagcggttcgttgttcctatatccatcgtcaatcagccttcatttcaaggcttgctaagtgaggctgaagaagaattcggatatgatcaccaaatgggcggtttaacaattccctgcagacaagataccttcattgatctcatttcccacttgagtgcattgtgagactggatatataatggagaacaattacatcaactgtgtgattgttacaatttggtacaccagacatatccccatcttgtacatttttttttcgatccaagaagaataaatattgtacccctggaatcgattatgtaaatggagactctagtaatattcatagcttctttacaataaagaaatattgtcccccaa

SEQ ID NO: 870 - protein, 100 aa, Malus x domestica
MGFRLPGIVSTKRSLVRSLCNSKQTADSKTLDIPKGYFSVYVGERQKKRFLIPVSYLNEPLLQDLLSQVEEEFGYDHPMGGITIPCSEDTFLHLTSRLSV

SEQ ID NO: 871 - DNA, 459 bp, Malus x domestica
actctctagtctaaaaattctcaagtacttttccttgatctgcaagttctattttctgaactttcgatctcgagatcttcaaaaatgggtttccgtcttccggctgtacttcctgctaagaaacttcttaggcggtccttttcaaatacaaccagaggagcttcaactaatttagtagatgtcccaaaaggttattttgcagtttatgttggcgagaacgaaaagcagagatatgtaattccagtatcattcctgaatgagcctgaatttcaagacttggtaagtcaggctgaagaagaattcgggtttgatcatcccatgggtggtctaacaattccctgcagacaagatgccttccttcatctcacttctcgcttgaatactttgtgagaatgcataattgaaagtctctatattacatgaacaaaaaattttgtacagtaaacaaactcaacattc

SEQ ID NO: 872 - protein, 100 aa, Malus x domestica
MGFRLPAVIPAKKLFRRSFSNSSQGASYNLADVPKGYFAVYVGESEKQRFVVPISFLCQPGFQHLLSEAEEFGFDHPMGCLTIPCRQDAFLDLVSCLSAV

SEQ ID NO: 873 - DNA, 664 bp, Malus x domestica
ccatcctaagaatcaaagcattctcttttttccaagtccttccaattccttttctagttcttttatccccttgagaacaaaaatccatgggtttccggttgcctggaattgttagcgccaagagaagtctcatccggtctctatctaattcaaaacagacagcttcaaagaccttagatatcccaaaaggctattttgctgtgtatgctggggagagacagaagaagcggtttgtgattccaatatcatacttgaatgatcctttgttccaagatttgttgagtcaagctgaagaggaatttggatatgatcatcccatgggtggtatcacaataccttgcagcgaatacactttccttcatctcacttcccgtctaagtgtgtgagtgaacactaaagaagtgaatatgcgatccactttcatgtccaaaaggatcctcactttggaactcactgagctacgatgaaggagaggctatggtcaatcatccattgaatcaactcacatccagtgttgaggtgaagccatcagtaatactgaagcagccagctgtgatctgagaagaaagtcaaaaaattaatgaagccgacaaacgaagatactcattcaagatataatcaacaaaacccaactttccaaaaacgatgactcaaaacttttcca

SEQ ID NO: 874 - protein, 99 aa, Malus x domestica
MGFRLPGIVSAKRSLIRSLSNSKQTASKTLDIPKGYFAVYAGERQKKRFVIPISYLNDPLFQDLLSQAEEEFGYDHPMGGITIPCSEYTFLHLTSRLSV

SEQ ID NO: 875 - DNA, 598 bp, Malus x domestica
tactcccaagcatatcttatcaaagctctttctgtaacgaaattcatttgaactctttattgttcctttttacagagaaattttaaaaccatgggtttccgattgcctggtattttacttgccaagaaaagtcaagtttcttcaaagtcattggatgttccaaaaggctatcttgccatctacgttggggagagccagaagaagcggtttattattccggtgtcctacttgaaccaaccttcattccaagatctgttaagtctatctgaagatgaatttggatatgatcatccaatgggtggtatcacaatcccctgcagtgaagacaccttccttggtctcacctcagctttggtgtataagtagaggctagctacatatacatcgacaccattttgacaccaacagctgtaaaagcgcttggcaattttaatcgctttctggctcacttgaaggaggttcaattaattgatcatccaatgaatcatcatgatggaagaggacatcaacgtcaaaccgcttatgagctgagaggaaaatggccagcctagctgacataaactcactgacacaaattttcaagaatagttattgtcaa

SEQ ID NO: 876 - protein, 101 aa, Malus x domestica
MGFRLPSVIPAKKLLRRSFSNSSQQVSYNLADVPKGYFPVYVGKSEKQRFVVPISILNQPSFQDLLSEAEEEFGYDHPMGGVTIPCRQDTFLDLISRLSAL

SEQ ID NO: 877 - DNA, 583 bp, Malus x domestica
agaatcaaaagctctcttttttctaagtacttcaaagtacttttcttgttcaattatcccctttgagaatataaagccatgggtttccgattgcctggaattgttagcaccaagagaagtctcgtccggtctctatgtaattcaaaacagacagctgattcaaagaccttagatatcccgaaaggctatttttctgtgtacgttggggagagacagaaaaaacggtttttgattccagtatcatacctgaatgagcctttactccaagatttgttgagtcaagttgaagaggaatttggttatgatcatcccatgggtggtatcacaatcccttgcagtgaagacactttccttcatctcacttctcgcttaagtgtgtgaatgaacagcaatagtgaatatgtgatccaaatttgtcatgtccaaaaggatcctcatttcggaactcactgacttaggacgaaggagaagctacgattcatcatccgtttaaccgttcgactcagatcctctgttgaggggaagccatctgcaacacttaagctgcctgtcagctgaggagaaaattatgaaatttatgaag

SEQ ID NO: 878 - protein, 101 aa, Malus x domestica
MGFRLPAIIPAKKLLRLSFSNSSQGALYNLADVPKGYFPVYVGESEKQRFVVPISIVNQPSFQGLLSEAEEEFGYDHQMGGLTIPCRQDTFIDLISHLSAL

SEQ ID NO: 879 - DNA, 485 bp, Medicago sativa
ggggacaaataattcttaccttaaagcaatcacaactcaagttcactttctctactacttctttgagatcattttgttgtgaagaaacaaaaacaagaatgggttttcgcttacccgttattagaagatcatcacttagtgcaagtcaatcatctagcaaacaagtggaagttccaaaaggcaatcttgcagtgtatgttggagagaaaatgaggaggtttatgattccaatatcattcttgaatgagcctttatttcaagaattgcttagccaatctgaagaggaattcggttattgccatccaatgggttgtcttacaattccctgcaaagaagacatgttcttacaaacaacttctgttttgaacaggctataaatgataacatagataggaatgataacataggaggagagtaggattgaccagttgagacaatttttgtaaatcagcaatttctttgtcaattttgatgtttcctcttac

SEQ ID NO: 880 - protein, 86 aa, Medicago sativa
MGFRLPSIIRSRASSSKTVDVPKGYLAVYVGEQMKRFVIPVSYLNQTSFQELLSQAEEQFEYDHPTGGLTIPRREDVFLEITSRLN

SEQ ID NO: 881 - DNA, 613 bp, Medicago sativa
ggggacacaaaatcattcacaatccaaaacatttgacattcagaaactttgagacttctaaatacaattctttcttttttagaccaatctcttcatttgaacacatacatacaacaatgggttttcgtttaccaagtatcatcagatcaagggcatcatcttcaaaaactgtggacgttccaaagggatatctagctgtgtatgtaggagagcaaatgaagcgatttgtgattcctgtatcatacttgaaccaaacctcattccaagaattgttgagccaagctgaggaacaatttgaatatgatcatccaacgggtggtctcactattcctcgcagagaagacgttttcttagagatcacttctcgtttgaattgaattggctctcggaagatcccataagactgacgtagatatttgacccatttttgtagcagtttagtttctcaccttcaaaagatttatcttttgttggtatcatatacttgtttataaaaaagttcacctcaacgagaaatttataacatcattactttatgttttcccttaacgaagcatatctgctaaatgttcagtttagaatctctagacgaatatgaaatagatttcctctg

SEQ ID NO: 882 - protein, 92 aa, Medicago sativa
MGFRLPVIRRSSLSASQSSSKQVEVPKGNLAVYVGEKMRRFMIPISFLNEPLFQELLSQSEEEFGYCHPMGCLTIPCKEDMFLQTTSVLNRL

SEQ ID NO: 883 - DNA, 541 bp, Medicago sativa
acggtaccggacatatgcccgggaattcggccattacggccggggacaaatcattggcatcatcaaatatttagttacaacttacatccttcttacatttgagattttttatttgttcttctctcaaacaataacaaaaaatgggtttccgtttaaactatattctaagaggatcggtaacagctagacaagcaacatcaaaatcagtagaagtgagaaagggctatgttgccgtgtatgttggagagaaactggcgcggtttgtagtccctgtatcatacttgaacaaaccttcatttcaagacttgttgagtcaagccgaggaagagtttggatatgatcatcccatgggtggcctcaccattccttgtacggaagatgtcttccaacatataatttcttccttgaatggactatgaatcttacactgtaggatactcacatagactagattatttgagacaattttcattataggcatcttttttaattgtaaatattacccttttcatgggaaatggagaaaatttactatctggcc

SEQ ID NO: 884 - protein, 92 aa, Medicago sativa
MGFRLHTILKGSVTARQASSKSVEVPKGYVAVYVGERQKRFVIPISYLNQPLFQDLLSQSEEEFGYDHPMGGLTIPCSEDVFQHITSCLNGL

SEQ ID NO: 885 - DNA, 510 bp, Medicago sativa
ggggacaactcattggcatcatcaaatatttagttacatccttcttacttttgatattttttctctgttcttctctcgaacaataagaaaaatgggtttccgtttacatactattctaaagggttcagtaactgctagacaagcatcatcaaaatctgtggaagttccaaagggctatgttgcagtgtatgttggagagagacaaaagcggtttgtgatccccatctcatacttgaaccaaccattgtttcaagatttgttgagtcaatctgaggaagagttcggatatgatcatccaatgggtggcctcaccattccatgctccgaagatgtcttccaacatataacttcttgcttgaatgggctatgaatcttacactgtagcatactgatatatgctagattagttgagacatttttcaaataggcatttatttgacttgtgaagttgtaaatatatgacacttttcatgagaaatggggaaatattaccatctgaatatcaaatgt

SEQ ID NO: 886 - protein, 87 aa, Medicago sativa
MGFRLPGMLRKISSSKGVDVPKGYLAVYVGEEMKRFVIPISYLNQPSFQELLSQAEEQFEYDHPMGGLTIPCREDIFLDITSRLSRC

SEQ ID NO: 887 - DNA, 571 bp, Medicago sativa
ggggaacacaaaatcatttacatcccaaagcatttgaaatccagaaacttgagtctttctttgtttatatcaatctcattttttcaacacatacaagaatgggttttcgtttacctggtatgctcagaaagatatcatcttcaaaaggtgttgacgttccgaaaggatatctagcagtatatgttggagaggaaatgaaacggtttgtgatcccaatatcatacttgaatcaaccatcgtttcaagaattgttgagccaagctgaggaacaatttgaatatgatcatccaatgggtggtctcactattccttgcagagaagacattttcttagatatcacttctcgtttgagtaggtgttgatccctttggtagaaggagctgacatagattatttaacttaatttgtacgaaagacaatttttttctcatttccatttcagtcttcctcctttgcaagtgaaaaaggatttgagggagatagtcatggacaaagattataattttttttggggctttaggccaatgttcaatgaatatatgttatatatttgccgatatcatattacaaa

SEQ ID NO: 888 - protein, 92 aa, Medicago sativa
MGFRLNYILRGSVTARQATSKSVEVRKGYVAVYVGEKLARFVVPVSYLNKPSFQDLLSQAEEEFGYDHPMGGLTIPCTEDVFQHIISSLNGL

SEQ ID NO: 889 - DNA, 450 bp, Medicago truncatula
aggacatcatcttcaaaaggtgtcgaggttccaaagggatgtctagcagtatatgttggagaggaaatgaaacggtttgtgatcccaatatcatacttaaaccaaccattgtttcaagacttgttgaaccaagccgaggaacaatttgaatacgatcatccaacgggtggtctcactattccttgtagagaagacatgttcttagatatcacttcttgtttgagtaggtgctaatccctttggtagaaggagctgacatagattatgtaacttaatttgtacaaaagacacttttttttcttttccattacagtcttcctcctgtgtaagttaaaaagcatttgaggcagatagttaaggagaaagattataacttgtttgaggctttaggacaatgctcaattaatatatgttataaacttatttgccaaaattataatacaaagtcac

SEQ ID NO: 890 - protein, 94 aa, Medicago truncatula
MGFRLPSIIKRSSSSKSVGVPKGYLAVYVGKDMKRFVIPISYLKQKSFQELLNQAEEQFEYDHPMGGLTIPCKEEVFLDITSNLNSSSMQILED

SEQ ID NO: 891 - DNA, 508 bp, Medicago truncatula
  misc_feature (477)..(477): n is a, c, g, or t
attccaactcccatttgaagttcaaaaactagtcttttctatatacaagtctgtctattttagaccaatcttttctttttaacacatacaatacaacaatgggttttcgtttaccaagtatcatcaaaagggcatcatcttcaaaatctgtgggtgttccaaagggatatctagctgtgtacgtaggagaggagatgaagagatttgtgatccctatatcatatttgaagcaaaaatcattccaagaattgctgagccaaagtgaggaacaatttgaatatgatcatccaatgggtggtctcaccattccttgcggagaagacgttttcttagacatcacttctcgcttgaattgaagatatcaaaagactgacatagatatttgaccaatttttgtagcactttagtttctaaccttcaaaagattttcacttttgttgttatcatacttggatgtaaaacgttcatctgaatganaaatttttgaacactattacattatttctct

SEQ ID NO: 892 - protein, 90 aa, Medicago truncatula
MGFRLTGIIRRAANQTSSKGVDVPKGYLAVYVGEEMKRFVIPISYLSQSSFQELLNQAEEQFGYDHPMGGLTIPCREDVFLDITSRLNLC

SEQ ID NO: 893 - DNA, 724 bp, Medicago truncatula
caagcattgagtataacaagataagtatatctctttagattttgagtggttacagttcgcactcttattgaacttattgatccttgatagaggcgtctaagacaatcccatgtgatctcttgtctcataggccctattcttttaacaatcatttccctagcaaagggatttcaaaaaactcttggaaactataaatacagtgtcctcctccttcacaacaatcacaaatcactcaagcaatcgatcttttatacacttatcttatatctgagaaattcatcttgttcttcaaaacatttgaaatgggtttccgtttacctgcagctattagacgggcttcattcagcagtagccaaacatcaaaagtattgaatgtgccaaagggctatcttgcagtgtacgtaggagagcaaatgaagcgatttgttatccccacgtcatacttgaaccaagcttcatttcaaaacctgttgagtcaagccgaggaagaattcggatatgaccatccaatgggcggcctcacaattccttgcacagaagacgttttcttgcatattacttctcacttcaatgggctataaatcttacactaaaggagactgacatagattagcaagaaaattttgtacaatagtcatcatttagatttgtttagattttgtttcatttttctacctttggaatgggttataattgtccatttaaatgacaaatttattcagga

SEQ ID NO: 894 - protein, 85 aa, Medicago truncatula
MGFRLPSIIKRASSSKSVGVPKGYLAVYVGEEMKRFVIPISYLKQKSFQELLSQSEEQFEYDHPMGGLTIPCGEDVFLDITSRLN

SEQ ID NO: 895 - DNA, 475 bp, Medicago truncatula
cctcgtgccgagaatttgagattcagaaacattcttcatttacaccagtctaccatttttagaccaatatcttttcataacacatacaagaatgggttttcgtttaaccggtatcatcagaagggctgcaaaccaaacatcttcaaaaggcgtggatgtgccaaagggatatcttgcagtatacgttggagaggaaatgaagaggtttgtgatcccaatatcatacttgagccaatcatcatttcaagaattattgaatcaagccgaggaacaattcggatatgaccatccaatgggtggtctcacaattccttgcagagaagacgttttcttagatattacttctcgtttgaatctgtgctaatatcttcagatgaaggaactgacatagattattttaggcaaaattgtacagaaggcacttacatatttttcattttagtctaccttttgacagtgaaagataaatagaaaa

SEQ ID NO: 896 - protein, 85 aa, Medicago truncatula
MGFRLPSIIKRTSSSKTVDVPKGYLAVYVGEKMKRFVIPVSYLNQTSFQELLSQSEEQFEYDHPMGGLTIPCREDIFLDITSHLN

SEQ ID NO: 897 - DNA, 368 bp, Medicago truncatula
ctagacaagcaacatcaaaatctgtagaagtgagaaagggctatgttgcggtgtatgttggagagaaactggtgcggtttgtagtccctgtatcatacttgaatcaaccttcatttcaagacttgttgagtcaatccgaggaagaatttggatatgatcatcccatgggtggcctcaccattccttgtacagaagatgtcttccagcatataatttcttccttgaatggactatgaatcttacactgtagcatactcacatagactagattaattgagacaattttcattataggcatcatttttacttgtaaatattacccttttcatgggaaatggagaaaaaaatactatttgaattacaaattc

SEQ ID NO: 898 - protein, 95 aa, Medicago truncatula
MGIRLPFMALQAKQIFKSTSTQQQSNVPKGHIAVYVGELQKKRFVVPISYLNHPTFLDLLSSVEEEFGYNHPMGGLTIPCKEDAFINLTSQLRAV

SEQ ID NO: 899 - DNA, 455 bp, Medicago truncatula
gcacgaggcctcgtgccgaattcggcacgaggcagtagccaaacatcaaacgtattgaatgtgccaaagggctatcttgcagtgtatgtaggagagcaaatgaagcggtttgttatccccacgtcatacttgaaccaagcttcatttcaaaccttgttgagtcaagtcgaggaagaattcggatatgaccatccaatgggcggcctcacaattccttgcacagaagacgttttcttgcatattacttctcacttcaatgggctataaatcttacactaaaggagactgacatagattagcaagaaaattttgtacaatagtcatcatttagatttgtatagattttgtttcatttttctacctttggaatgggttataattgtccatttaaatgacaaatttattcaggaccaaattatctgttattatttatttctaatcataataacagaatg

SEQ ID NO: 900 - protein, 92 aa, Medicago truncatula
MGFRLPAAIRRASFSSSQTSKVLNVPKGYLAVYVGEQMKRFVIPTSYLNQASFQNLLSQAEEEFGYDHPMGGLTIPCTEDVFLHITSHFNGL

SEQ ID NO: 901 - DNA, 519 bp, Nicotiana benthamiana
agctttctctgctttagaggtcttcagcatttcagtttttctttcctcgtctatactaaagctaaaagaatcatggctattcgtatgcctcgtataatcaagaagtcttccacatctgcagatgttcccaagggatcttttgttgtatatgtcggggaggagcagaagaagagatttgtgattcccatatcattcttgaaccaaccgttatttcaagacttgcttagtcaagctgaggaagaatttggctttgatcatccaatggggggtctcacaatcccctgcagagaggacgtctttgtcgaccttactcctcgtttgaggaactgagacagaaacttgtttttacaattttgtagagcagtaaagcaggatttgcatagtttgtataatggaagagttagagaaaactgtagttaaaatgtggaatgttagtgaacttaacttcacaaagcctgattggttattcatgttaaatagatgaatgactctgtacttttttctacttcaaagataatg

SEQ ID NO: 902 - protein, 115 aa, Nicotiana benthamiana
MDGKFLKACQRIIPCTNCDKCCKWPIWPFLQEEKTIPSDVPRGHLDVYVGKYQKRFVIKITLLNHPLFKALLDQAQEVYDFTSESKLWIPCDENIFVSVIRCAKSSENRRISICF

SEQ ID NO: 903 - DNA, 466 bp, Nicotiana benthamiana
tcgcatgggcgcgcctactccctctctttatattctgctcaaaggaatatccaaataatggatggaaaatttctcaaggcatgtcaaagaatcataccttgtacaaattgtgacaaatgctgtaaatggccaatatggccatttttgcaagaagagaagactatcccaagtgatgttccaaggggtcacttggatgtatatgtaggaaaataccaaaaaagattcgtaatcaaaatcactttgctcaatcatccacttttcaaggcattgctagatcaagctcaagaagtttatgattttacttctgaatcaaaattatggattccttgtgatgaaaacatctttgtcagtgtcataagatgtgccaagtcttcagaaaatcgacgcatctcgatctgtttttgatgttaaaatcatagaggttgtgcttaaatttcattcatgatgtttgatcaatcaaactcat

SEQ ID NO: 904 - protein, 85 aa, Nicotiana benthamiana
MAIRMPRIIKKSSTSADVPKGSFVVYVGEEQKKRFVIPISFLNQPLFQDLLSQAEEEFGFDHPMGGLTIPCREDVFVDLTPRLRN

SEQ ID NO: 905 - DNA, 516 bp, Nicotiana benthamiana
tctatcaatctaaccaagtctctacttcaatagaaaatttatcaaatctttacttcttacatatcaagagaagccatggggttccgtttgttaccaatgatttccagtgtcaagcaaatacacaaactgcagtctgttcttacaagggatcgttcagatgttcctaaaggacattttgcagtttatgttggagagacggagaagaaacggtatgttgtgcccataacatacctgaaccatccttcattccagaacttgttacgcaaagcagaagaagagtttgaatttcatcatccaacaagtggtctaacaataccttgcaaggagaatgattttgttgatgtgacttctcgattgaatttatgaaataaagagccaagaagtagcattctgagcttcagattagagctagcttagaattttcagtttttgtttttcatcttgcatcttgctagtaaagagtattaaacttatgtacaaagccttcaagaaaagcatataaatgaaatctttacc

SEQ ID NO: 906 - protein, 96 aa, Nicotiana benthamiana
MGFRLLPMISSVKQIHKLQSVLTRDRSDVPKGHFAVYVGETEKKRYVVPITYLNHPSFQNLLRKAEEEFEFHHPTSGLTIPCKENDFVDVTSRLNL

SEQ ID NO: 907 - DNA, 553 bp, Nicotiana tabacum
ataacagctctcagcaaaacttgcaaccatacaaagcttttctctgctttcagggtcattactaattattcccttccttatttgctcatttgtattgaactaaacaaccatggctatccgtatgcctcatataatcaagaagtcttctacaactggagatgttccaaagggacattttgctgtttatgttggagagaagcaaaaggagagatttgtgatcccattatcattcttgagtcaaccgacatttcaagacttgcttagccaagctgaggaagaatttggatttgatcatccaatgggtggtcttacaattccctgtagcgaggatgtgttcgttgatcttacttctagcttgtgtaggatctgaggcttttccttttacaattttgtaaagaactaacatggactctagttgtacattagaagagttaaaaaaagacacatcatttatatgataccactgataattagatagagggggttactgttagctgcaacagtagatcccgattgaatgtaattttgtaaagagataagcataatattcttt

SEQ ID NO: 908 - protein, 105 aa, Nicotiana tabacum
MAIRKSNKLSQAVLLKQILKRCSNLGKKHVYNDEDFLPIDVPKGHFAVYVGENRTRYIVPISFSSHPEFQCLLRCAEEEFGFDHDMGVTIPCEELVFQSLTNMLR

SEQ ID NO: 909 - DNA, 514 bp, Nicotiana tabacum
accatagctctccacaaaactagaaatctactcaaagctttcagaattttggtatttcttctcttcatcgtttgctcgtcttaaataaaaaatcatggctatccgtgttcctcgtataatcaagaaatcctcaacagatcatattccaaaggaccattttgttgtttatgttggggagaagcagaggaagagatttgtgatacctatatcatacttgaatcggccttcatttcaagatttgctaagtcaagctgaggaagaatttggctttaatcatccaatgggtggtgtcacaattccctgctcagaggacatcttcattggcctcactcctcaattttaggatttaataacatagttgagatcatttttcccttttaggtctcacaattttgtatatcaaagcaaaagtaaaagatccgtcttgtatagttgattagttagaagctaactttagcatagcactacaaaatttggtgatttttgactcacaaagtatacaacacgatttgtt

SEQ ID NO: 910 - protein, 99 aa, Nicotiana tabacum
MGIIRLPSMISNVKQFHKLHSVLTRNHSDVPKGHFAVYVGETEKKRYVVPIAYLNHASFQELLRKAEEEFGFQHPMGGLTLPCNEDAFFHLTSRLNTTL

SEQ ID NO: 911 - DNA, 422 bp, Nicotiana tabacum
ccgtaccaaagggacatttagctgtgtacgtgggtgagaagaaagatgacacgtgtagaatagtggtgcctgtgatgtattttaatcaccctttgtttgctgatttgttgagggaagcagaaatgatttacgggtataatcattcgggtgggatccaaattccatgtcggatttctgactttgagaacgttaaatcaagaatcgccgccacgggcggcggtgaaaactgccgtgtataatggagcgggaagtgcacatactgatttagactagggaacaaccccctacctttgcctattttccaccgacggaaaagggcacgatgtgttagggaggtttagtttatgttacttctttgttatacttgagggaaaaagaaaactgtctttttttttctttttagaaatgtttgtagtgatatc

SEQ ID NO: 912 - protein, 108 aa, Nicotiana tabacum
MAIRKSNKLSQTAMLKQIMKRCSSLGKKNGSYNDEQLGLPLDVPKGHFVVYVGENRTRYIVPISILSRPEFRSLLQRAEEEFGFDHDMGLTIPCDEDVFESLTSSILR

SEQ ID NO: 913 - DNA, 615 bp, Nicotiana tabacum
agttttcaaatcaaataccaatagttcattcacctcaacaagttccacttcaatcacaacaatatatagttacgttcaatatatatcaacgagtcatgggaattattcgtttgccatctatgatttccaatgtcaaacaattccacaaactgcactctgttctgactaggaatcattcagatgttccaaaaggacattttgcagtttatgtgggagaaacagagaagaaacggtacgtggttccaattgcatacttaaatcacgcttcgtttcaggaattgcttaggaaagcagaagaagagtttgggtttcaacatcctatgggtggtctcactttaccttgcaatgaggatgcattttttcatctcacttctcgattgaacactactttatgatatgaagatatttgatatgcagcatttgattcgacatatatctagattagagcttagtgttttttcttttaatattttttcctcttgttatgcaagagctgtaaatttatgcaaagcctttccaccagctcacattgtttagagagccggaaaggacatatacatgtaatttgtgccatttattctcagttgtcttgcaacatggattgcgaaattctct

SEQ ID NO: 914 - protein, 82 aa, Nicotiana tabacum
MAIRVPRIIKKSSTDHIPKDHFVVYVGEKQRKRFVIPISYLNRPSFQDLLSQAEEEFGFNHPMGGVTIPCSEDIFIGLTPQF

SEQ ID NO: 915 - DNA, 813 bp, Nicotiana tabacum
caactctcagcaaaacttaaacgtagtcaaaactttctctgcttttgaggtctttagtagttcaattttttcttccttagtctatactaaagccaaaataatcatggctattcgcatgcctcgtataatcaagaagtattccacaaatggagacgttccaaaaggccactttgctgtgtacatcggggagaagcagaagaagagatttgtgatccctatatcattcttgagtcaaccggaatttcaatatatgcttagtcaagctgaggaagaatttggcttcgatcatccaatgggcggtgtcataattccctgctcagatgacattttcattggcatcacttctcagtttaggatataaacatgttttgagaagttccacaccatcacagctatccacaaaactagagaactactcgaaatttctcttcatcctttactcatcttaaataaaagatcatggctatccgtatgcctcgtattatcaagaagtcttctacaactggagatgttcccaagggatattttgttgtttatgttggggagaagcagaagaagagatttgtgattcccatatcattcttaagtcaaccgacatttcaagatttgcttagtcaagctgaggaagaatttggcttcgatcatccaatgggcggtgtcataattccctgctcagatgacattttcattggcatcacttctcagtttaggatataagaatataattgagaatcatcttttcgtttataggtctcacaattttgtatacgaaagcaggagatcttttttgtacagttgattagttattaaaag

SEQ ID NO: 916 - protein, 85 aa, Nicotiana tabacum
MAIRMPRIIKKYSTNGDVPKGHFAVYIGEKQKKRFVIPISFLSQPEFQYMLSQAEEEFGFDHPMGGVIIPCSDDIFIGITSQFRI

SEQ ID NO: 917 - DNA, 608 bp, Nicotiana tabacum
  misc_feature (459)..(459): n is a, c, g, or t
  misc_feature (479)..(479): n is a, c, g, or t
gcaaaaagaagtaatcattctttcttgttcttccaaagataaagttctcaactttctttagtatataatcaagaaaatactacaaaaaatggccatcagaaaatcaaacaagctatcacaagctgtactcttgaagcaaattttgaaaaggtgttcgaatttgggcaagaagcacgtctataacgacgaagacttccttcccattgacgtaccaaaaggtcattttgcagtttacgtaggagaaaatcgaactcgatacatcgtaccaatttctttctcgtctcatcctgaatttcagtgcctcctccgttgcgccgaggaagaatttggcttcgatcatgacatgggcgtcaccattccgtgtgaagaactagttttccagtcactgactaatatgctgagatagtaaataaagtatttgaaatgaagaaaaaagagtgaatagtaggtgtaaggttntgtagtgaagaaggattggntcaagatgaagcaatttttagtatttttgcttctctttttttctaacatcttttttcactttttctctttttctttttcttttcttgtttgtgaccttcctttaacgtaccctgacctaggaaccacat

SEQ ID NO: 918 - protein, 86 aa, Nicotiana tabacum
MAIRMPHIIKKSSTTGDVPKGHFAVYVGEKQKERFVIPLSFLSQPTFQDLLSQAEEEFGFDHPMGGLTIPCSEDVFVDLTSSLCRI

SEQ ID NO: 919 - DNA, 276 bp, Oryza sativa
atggcgatggcgagggggaggaaggagagggcgccgcgagggtacgtgccgatcctgatcggcgggcagggggaggagagggagaggatcctggtgcgcacggagcagctcaagcagccgcacttcctcgcgctgctcgacctcgcggtgcaggagttcggctacgagcagcgggggattctctgcatcccctgcaccaccaaggccttccgttccatcgtcggtgcagccacgcccaccgccgccgccgtcgccggcggcgagatcaagtcatga

SEQ ID NO: 920 - protein, 91 aa, Oryza sativa
MAMARGRKERAPRGYVPILIGGQGEERERILVRTEQLKQPHFLALLDLAVQEFGYEQRGILCIPCTTKAFRSIVGAATPTAAAVAGGEIKS

SEQ ID NO: 921 - DNA, 501 bp, Oryza sativa
atgaaggaaggaggaggaggaggaggggagaggaggaacatcctggccaagacgatcgacaggtgccggtcgtcgctggggcaccggacaacgaggcgccccgcctccgccgccggcggcggcggctacggcggcgcggccgtgccggcggggttcttcgcggtgctggtggggccggagaaggagcggttcgcggtgcgggcgcggtgcgccaaccacccgctgttccgggctctgctggaccaggcggagacggagtacgggttcgccgggtgcgagggccccctcgagctcccctgcgacgtcgacgccttcatggacgtcatgtgggagatggagcaggccgaccccgccgcgtccccgcgctgcggcgcgcgcttcggcggtcccgccgccgccggcagcggcaggggctacgggggccacggccaccaccaccaacaccaggggtaccagatgatgagcaccccggcgaggctcctcgtcgccggccgctcgtga

SEQ ID NO: 922 - protein, 166 aa, Oryza sativa
MKEGGGGGGERRNILAKTIDRCRSSLGHRTTRRPASAAGGGGYGGAAVPAGFFAVLVGPEKERFAVRARCANHPLFRALLDQAETEYGFAGCEGPLELPCDVDAFMDVMWEMEQADPAASPRCGARFGGPAAAGSGRGYGGHGHHHQHQGYQMMSTPARLLVAGRS

SEQ ID NO: 923 - DNA, 573 bp, Oryza sativa
atgcaggcgaggcggcacagaggattccggctaggccggaagctgctcgggctctggcgatgggcgctctgccaccggcggcggcggcgcggccgcggctacctccgcctgcagccgtgcccgggagctgcaggcggccgctcccctctgctggccgccgggagcgtcaagaagcagccgccgccgccgcagcagcagatcgtcgtgcatcagcgtggtggggagaaggcggtgctcaagtgggggcggtcgctggcgcggcggatgaggctcctgcggcggcggggatccgagcggctcctggaggaatcccccggggaggcgacgacgcccaaggggcaggtggcggtgtacgtgggcggcggcgagcccggggagtcgatgaggtacgtggtgccggtggtctacttcaaccacccgctgttcggcgagctgctccgcgaggccgaggaggagttcgggttcgcgcacccgggcggcatcaccatcccctgcgccgccgcgcggttcgagcgcgcggccgccgtggccgccgcgggcggcggcgggaggaaggtgcccacctggtggtag

SEQ ID NO: 924 - protein, 190 aa, Oryza sativa
MQARRHRGFRLGRKLLGLWRWALCHRRRRRGRGYLRLQPCPGAAGGRSPLLAAGSVKKQPPPPQQQIVVHQRGGEKAVLKWGRSLARRMRLLRRRGSERLLEESPGEATTPKGQVAVYVGGGEPGESMRYVVPVVYFNHPLFGELLREAEEEFGFAHPGGITIPCAAARFERAAAVAAAGGGGRKVPTWW

SEQ ID NO: 925 - DNA, 387 bp, Oryza sativa
atgctgcagggggaggagaagaaggccgggaaggtgaagaaagggtggctggcggtgagggtcggggtggagggcgccgacggcggcgacggcggcgggttccggcggttcgtcatcccgatcgcctacctctaccaccccttgttccgccgcctgcttgaggcggcgcgcgacgcctacggctacgactcggccggcccgctccggctcccctgctccgtcgacgagttcctccgcctccgctcgctcgtggagcgggagacccacgcggccggcggcggcggcggcggctcgtcgtcgccgcaccgcgtccacgccggcggcggatcgcaccaccaccaccactactccttctccccgtgcacccgcgccaaagtcagctcctga

SEQ ID NO: 926 - protein, 128 aa, Oryza sativa
MLQGEEKKAGKVKKGWLAVRVGVEGADGGDGGGFRRFVIPIAYLYHPLFRRLLEAARDAYGYDSAGPLRLPCSVDEFLRLRSLVERETHAAGGGGGGSSSPHRVHAGGGSHHHHHYSFSPCTRAKVSS

SEQ ID NO: 927 - DNA, 624 bp, Oryza sativa
atgggatgttttgttcggttcgcatcgcaacaggttcggtggacgggcacggcaggcaccaccggcgattgctgcagcacggcgtcgtcgtctctcgccggcaagggccacagcgcggtgtacaccgccgacggggcgcggttcgaggtgccattggtgtaccttggcatgatggtcttcggcgagctcctcgccatgtctcaagaggagtttggcttcgccagcgacgatggcaggatcacattgacgtgcgatgcgttggtgatggagtacgtcatgtgcttgattagcatagatgcctctgaagaggttgagagggtgttcttgagcttcatggcaagttcttgccactgtgtcggaggaaccagccatcagttttacgatgtcggagaacggcgggctgttcgggatcggctgccacggctggctgaggtaggtctccatgctgctgccggcaggggcgccgcggaggaggtcatcgtcggcgtagatgctgcagtactggaacgagaagccggtggcgcgggattgggcggtgatggtgttctgctggccgtggagggaaggcgcatgatgatgtcgcagtgctggaagacggcggtgacgtcgccgaagatgagttag

SEQ ID NO: 928 - protein, 207 aa, Oryza sativa
MGCFVRFASQQVRWTGTAGTTGDCCSTASSSLAGKGHSAVYTADGARFEVPLVYLGMMVFGELLAMSQEEFGFASDDGRITLTCDALVMEYVMCLISIDASEEVERVFLSFMASSCHCVGGTSHQFYDVGERRAVRDRLPRLAEVGLHAAAGRGAAEEVIVGVDAAVLEREAGGAGLGGDGVLLAVEGRRMMMSQCWKTAVTSPKMS

SEQ ID NO: 929 - DNA, 357 bp, Oryza sativa
atgaggcagctcatccggcggctctcccgcgtcggcgactcctccgccgccgccgcctcgtcgtcgtcgccggggaagcggcggggcgcagggacgaagaagaaggcggcggcggcgggggtgccgccggaggggcacgtgccggtggacgtcggggaggaaggggaggaggcgacggagcggttcctcgtgcgggccgagctgctggggcggccggcgctggccgagctgctgggccgcgccgcgcaggagtacggctacgaccaccgcggcccgctccgcatcccctgctcccccgccgccttccgccgcgcgctcgccggcgccggggatggagaccacgacgacgacggctag

SEQ ID NO: 930 - protein, 118 aa, Oryza sativa
MRQLIRRLSRVGDSSAAAASSSSPGKRRGAGTKKKAAAAGVPPEGHVPVDVGEEGEEATERFLVRAELLGRPALAELLGRAAQEYGYDHRGPLRIPCSPAAFRRALAGAGDGDHDDDG

SEQ ID NO: 931 - DNA, 321 bp, Oryza sativa
atgatgtggaggaggaagagcagcagcagtggcggcgtgtcacccgccggcgcctcgccgcgccacggcggcgacgacaacgacgaatgcaatgtctttccgagagggtacgtaccgatagtcgccggcagcggcgacggggagcgcgtgctggtgccggttagtctactcggggacccgtgcatcgcggagcttctggacatggcggtgcagcagtacgggtacggccagccgggcgtgctgcgggtgccctgcgacggcgagcgtctacggcgagtcgtggagggcgcgctgcggaagggcggtggccagtcagcatga

SEQ ID NO: 932 - protein, 106 aa, Oryza sativa
MMWRRKSSSSGGVSPAGASPRHGGDDNDECNVFPRGYVPIVAGSGDGERVLVPVSLLGDPCIAELLDMAVQQYGYGQPGVLRVPCDGERLRRVVEGALRKGGGQSA

SEQ ID NO: 933 - DNA, 405 bp, Oryza sativa
atggtgtactggaggagcaagagcggcggcggtggcgcctcaccgagccgcgccaacggcggcgaggatgatcaggtcccgagagggcacgtcccgatggtcgccggctgcggcggcggcgacggcgacggcggggagcgcgtgatggtgccggtgaggctgctcggcgacccgtgcatcgcggagctgctggacatggcggcgcagcagtacgggtacggccagccgggcgtgctgcgtgtgccctgcgacgccggacatttccggcgagtcgtcgagcgcgcgctgcggaaggacggtggccgattggcaaataataaaggggtttgtagagctaagcttggggctaaaaccctaatatgcaccagacttcccactacccttgaggaggaccttgtgttctga

SEQ ID NO: 934 - protein, 134 aa, Oryza sativa
MVYWRSKSGGGGASPSRANGGEDDQVPRGHVPMVAGCGGGDGDGGERVMVPVRLLGDPCIAELLDMAAQQYGYGQPGVLRVPCDAGHFRRVVERALRKDGGRLANNKGVCRAKLGAKTLICTRLPTTLEEDLVF

SEQ ID NO: 935 - DNA, 321 bp, Oryza sativa
atggtgtggaggaggaagagcggcggcggcagcggcggcgcctcgccgtgccgcgagaacggcgaggatgaggtcccgagagggcatgtcccgatggtcgccggcggcggcggcgactgcggcgacggcggcggggagcgcgtgatggtgccggtgaggctgctcggggacccgagcatcgcggagctgctggacatggcggcgcagcagtacgggttcggccagccgggcgtgctgcgtgtgccctgcgacgccgggcatttccggcgagtcgtcgagtgcgcgctgcggaggggcgccgccggcggccagacggcatga

SEQ ID NO: 936 - protein, 106 aa, Oryza sativa
MVWRRKSGGGSGGASPCRENGEDEVPRGHVPMVAGGGGDCGDGGGERVMVPVRLLGDPSIAELLDMAAQQYGFGQPGVLRVPCDAGHFRRVVECALRRGAAGGQTA

SEQ ID NO: 937 - DNA, 390 bp, Oryza sativa
atgaagggaggaggatcaaagaggagattgctccgggccttcctccactcatggaagaagctcggcgccgccgccgccgccgcggccccggcggccggcgagtgggctcctctcgacggtgacggcgagggcgccatcccgagcgacgtgccccggggccacacggtggtgtacgtcggcgaggagctgcgccgctacgtcgtcagggtgtcgtccctcgaccacccgctgttccgcgagctgctcgaccgcgccagggaggagtaccagttcgccgccggcgccgacgcgaggctgtgcataccctgcgacgaggacatcttcctcggcgtcctctgccatgtcgactccaagcaggagcactggaggctgatctcgttttgcagatag

SEQ ID NO: 938 - protein, 129 aa, Oryza sativa
MKGGGSKRRLLRAFLHSWKKLGAAAAAAAPAAGEWAPLDGDGEGAIPSDVPRGHTVVYVGEELRRYVVRVSSLDHPLFRELLDRAREEYQFAAGADARLCIPCDEDIFLGVLCHVDSKQEHWRLISFCR

SEQ ID NO: 939 - DNA, 504 bp, Oryza sativa
atgctaaagcggtcgcatggagggttccggctggggcggaagctgctcagtgcctggcgatgggcgctctgctgccggcgccggcgccggcggggctacctgcgcctgcagacgacgtcgggtgggtgcggcggcgcttgcaaggaggggagcgaagaagccaagaggctggccccggtgctgcggtgggggcggtcgctggtgcggcggctgagcctcgggcggaaggacggcgggcggcggcggattctggacgagcccgtgtcgacgcccaaggggcaggtggcggtgtacgtcggcggcggcaaccccggcgagtcgctgaggtacgtggtgccggtggtgtacttcaaccaccccatgttcggggagcttctgagggaggccgaggaggagttcggcttccagcaccccggcggcatcaccatcccctgcgccgcgtcgcggttcgagcgcgccgccgccgtggcggccgccgggaagaaggcgttcggcaggtggtag

SEQ ID NO: 940 - protein, 167 aa, Oryza sativa
MLKRSHGGFRLGRKLLSAWRWALCCRRRRRRGYLRLQTTSGGCGGACKEGSEEAKRLAPVLRWGRSLVRRLSLGRKDGGRRRILDEPVSTPKGQVAVYVGGGNPGESLRYVVPVVYFNHPMFGELLREAEEEFGFQHPGGITIPCAASRFERAAAVAAAGKKAFGRW

SEQ ID NO: 941 - DNA, 369 bp, Oryza sativa
atggctagcgcctcctctcaattctcattaccgaagcacaccttgcctggcagcatcacgagagcggcggcggggcattcatctggggtagtagctgagatgaaggccgggtacgtgccggtgctggtcgggaagagcggcggcggcggcggcgaggcggcgacgaggtttcttgtgccggtggggctactgaacgacccgtgcatggaggcgctgctggagctcgccgccgacgagatggggtacgggcaggagggcgtcctcatcatcccctgcgacgccgacttcttccgcagggtcgtcacggccatcccgtcggccaacaaggcgaacctcatctgtagcccaaacagccaaactgactgctag

SEQ ID NO: 942 - protein, 122 aa, Oryza sativa
MASASSQFSLPKHTLPGSITRAAAGHSSGVVAEMKAGYVPVLVGKSGGGGGEAATRFLVPVGLLNDPCMEALLELAADEMGYGQEGVLIIPCDADFFRRVVTAIPSANKANLICSPNSQTDC

SEQ ID NO: 943 - DNA, 531 bp, Oryza sativa
atggaggagcagcagcatctgcatcccggcggcggcggcggcaagaagtcgaacaagatcaccgagatcgtgcggcttcagcagatgctcaagaagtggcgcaagctctccgtcgcgccgaaagacgcggccgccaccgccggcaatggcggcggcggcgagagcaaggcgaagaagttcctgaagaggacgctgtcgttcacggacggcggcgcgtcgccgggggggacgccgccgccgagggggcacctggcggtgtgcgtggggccgacggcgcagcggttcgtgatcccgacggactacctgaagcaccgggcgttcgcggcgctgctccgggaggcggaggaggagttcgggttccagcaggagggcgtgctccgcatcccctgcgaggtgcccgccttcgaggccatcctcaaggccgtcgagaagaacaagaaggacaacgccgccgccttctgctactgcagctacgagtacgccgccgacgaggtcgccctcggcgcccccaacaacccattgtgcagatga

SEQ ID NO: 944 - protein, 176 aa, Oryza sativa
MEEQQHLHPGGGGGKKSNKITEIVRLQQMLKKWRKLSVAPKDAAATAGNGGGGESKAKKFLKRTLSFTDGGASPGGTPPPRGHLAVCVGPTAQRFVIPTDYLKHRAFAALLREAEEEFGFQQEGVLRIPCEVPAFEAILKAVEKNKKDNAAAFCYCSYEYAADEVALGAPNNPLCR

SEQ ID NO: 945 - DNA, 759 bp, Oryza sativa
atggggacccgagccgactcctctctctctctccccctccctcgctgttgcctgcatcacactaccgtactccgacgacacgtgtacgtgaggctgcagctgggccccactcgtgaactccgcggtggcgcgaacgctgtgcggtgttccgcggcggtgcacgagatcccggctccgatcccactcaaaccggagcgcaagtacgccccccgtggtcctaatcgtacccgcacccactgccatgtggggcccatgcgtgcgtgggacccacctgtacgtgttggcaacctcagccccacgcgggtatatagcgacgtgctcgccctcgtctctccgcctccttcctccctctctctgcgcgacactgtgctctctcttcctcctccattattgacgatgagggggttgatgcggtgcgcgtcgacgggggcgtgcagggtggcgccgggcgccgtggcggcgagggcgtcggcggcggcggtgggaggagggacgacgaaggtgccggcggggcacgtgccggtggaggtgggggcagagggggaggagacggagcggttcgtggtgccggccgagctgctggggcgcccgcccatcgccgagctcctccgccgcgccgcgcaggagtacggctacgcgcgccgcggcccgatccgcatcccctgccccgccgccgccttccgccgcctcctcggcgccctcaccggcggctccggcgaggggggcctcgcgctctcctacttcagcgtggtggtctga

SEQ ID NO: 946 - protein, 252 aa, Oryza sativa
MGTRADSSLSLPLPRCCLHHTTVLRRHVYVRLQLGPTRELRGGANAVRCSAAVHEIPAPIPLKPERKYAPRGPNRTRTHCHVGPMRAWDPPVRVGNLSPTRVYSDVLALVSPPPSSLSLRDTVLSLPPPLLTMRGLMRCASTGACRVAPGAVAARASAAAVGGGTTKVPAGHVPVEVGAEGEETERFVVPAELLGRPPIAELLRRAAQEYGYARRGPIRIPCPAAAFRRLLGALTGGSGEGGLALSYFSVVV

SEQ ID NO: 947 - DNA, 432 bp, Oryza sativa
atggccaaatgcagcaagatccgctacatcgtctggctccggcagacgctgcggcggtggcggtcccgggccgcggcgcgcgcggcggcggaggcggtgccggcggggcacgtggcggtgtgcgtgggcggggcgtcgcggcggttcgtggtgcgggcggcgcacctgaaccacccggtgttcagggagctgctccggcaggcggaggaggagtacggcttcccgtcgggcgcctactgtggccccatcgcgctcccctgcgacgagggcctcttcgagcacgtcctccggcacctctcctcgccgtcctccgccgcgcggttcgtcaccctcgaggacatccagagcggcgccctctcctgctgctgcgccgccgccggcgacgccctcccgctcctccgcggcattgccaccgacaaggccgtgtggtga

SEQ ID NO: 948 - protein, 143 aa, Oryza sativa
MAKCSKIRYIVWLRQTLRRWRSRAAARAAAEAVPAGHVAVCVGGASRRFVVRAAHLNHPVFRELLRQAEEEYGFPSGAYCGPIALPCDEGLFEHVLRHLSSPSSAARFVTLEDIQSGALSCCCAAAGDALPLLRGIATDKAVW

SEQ ID NO: 949 - DNA, 462 bp, Oryza sativa
atgtgcaaggtcatcacgatccagtcgctcgtctggctgcgccgcacggtgcggcggtggcgctcccgcgccgcggcgcgcccggccggcagcaagatggagcgggacggcgacgcggttccggcgggtcacgtggccgtgcgggtgggaggcggcggggaggacgcgaggcggttcgtggtgcgggtggcgcacttgaaccacccggcgttccgggagctgctccgccaggcggaggaggagtacggcttcccgtccggcgcctccggccccgtcgcgctcccctgcgacgaggaccacttccgcgacgtcctccgccgcgtgtcctccgacgagcgccacgacctggccttctgccggcccgccgccacctgcggcgtcacgaagcgccgcgccgagtcgtcttcgtcgtcgtcgtcgcgggcgccgctgcttcaagggatggacagcctcgtctggtga

SEQ ID NO: 950 - protein, 153 aa, Oryza sativa
MCKVITIQSLVWLRRTVRRWRSRAAARPAGSKMERDGDAVPAGHVAVRVGGGGEDARRFVVRVAHLNHPAFRELLRQAEEEYGFPSGASGPVALPCDEDHFRDVLRRVSSDERHDLAFCRPAATCGVTKRRAESSSSSSSRAPLLQGMDSLVW

SEQ ID NO: 951 - DNA, 360 bp, Oryza sativa
atggcgatcaagaagggcggcgcggcggggctgaagcagatactgaagcggtgctcgagcctggggcggcggcagcaggagcagaagcaggtcagcgagtgggaggaggaggaggaggcgtccggcttgccgtccgacgtgccgaggggccacttcgcggtgtacgtcggcgagcggcggcggcggttcgtggtgcccctcgcgcttctcgaccggccggagttccgctccctgctccgccgcgccgaggaggagttcggcttcgccggcgccggcgccggcggcctcctcgtcctcccctgcgaggaggtcgccttccgctccctcacctcctccctccactactcctgcacccgctga

SEQ ID NO: 952 - protein, 119 aa, Oryza sativa
MAIKKGGAAGLKQILKRCSSLGRRQQEQKQVSEWEEEEEASGLPSDVPRGHFAVYVGERRRRFVVPLALLDRPEFRSLLRRAEEEFGFAGAGAGGLLVLPCEEVAFRSLTSSLHYSCTR

SEQ ID NO: 953 - DNA, 423 bp, Oryza sativa
atgaagcgtctcctcaggcgcctctcccgcgtcgccgcggccgacgcctgcgccgccgccgcgtaccagccgctccgggctgaccggacggcgaagctgtccgcgtcctcctcctcctccctcgccggcgcgaggcggctggggtgcggcgcgcgcgtcccggaggggcacgtgccggtgtgcgtcggcgaggagggcgggcccgtggagcgctacgccgtgcggacggacctcctcggccagccggcgttcgcggcgctgctccggcgggccgcccaggagtacggctacggccacccgggcgcgctccgcatcccctgccccgtcgccgacttccaccagctcctcctccgcctctccgccgccgccgccggcgacggcgacgacgacgacgaagacggcggcggcctggtctactactag

SEQ ID NO: 954 - protein, 140 aa, Oryza sativa
MKRLLRRLSRVAAADACAAAAYQPLRADRTAKLSASSSSSLAGARRLGCGARVPEGHVPVCVGEEGGPVERYAVRTDLLGQPAFAALLRRAAQEYGYGHPGALRIPCPVADFHQLLLRLSAAAAGDGDDDDEDGGGLVYY

SEQ ID NO: 955 - DNA, 402 bp, Oryza sativa
atgagggagctgatgcggaggatgagcttctctgaccgcgttggcggcggcggcggcggcgacggcggcggcggcggcgcggcggcggccgtgaagcgcgggctgatgaggaggctgagcttctcggaccgcgcgggcggcggcggcggcggcgacggcgtgccgcgcgggtgcgtgccggtgatggtgggggacaacggcggcgacggcgatggcggcggcggcggcggcgagcggttcgtggtgcgggtggaggcgctgcggcacccggcgttcgcggcgctgctggagaaggcggcgcaggagttcgggtacaagcaggagggcatcctccgtgtgccctgcgacgtcagccatttccagcaagtcctccacgccgccaccgccgccgccaagagctaa

SEQ ID NO: 956 - protein, 133 aa, Oryza sativa
MRELMRRMSFSDRVGGGGGGDGGGGGAAAAVKRGLMRRLSFSDRAGGGGGGDGVPRGCVPVMVGDNGGDGDGGGGGGERFVVRVEALRHPAFAALLEKAAQEFGYKQEGILRVPCDVSHFQQVLHAATAAAKS

SEQ ID NO: 957 - DNA, 405 bp, Oryza sativa
atggaggatcatcagggtggcggtgtaggcagggcgagcaacaagatcagggacatcgtgaggctgcagcagctgctcaagaggtggaagaagctggcgaccatggcgccgggggggaggagcggcgtgcccaaggggtcgttcgcggtgtacgtcggcgaggagatgcggcggttcgtgatcccgacggagtacctcggccactgggcgttcgagcggctgctccgcgacgccgaggaggagttcggcttccgccaccagggcgccctccggatcccctgcgacgtcgccgccttcgaggccaccctccgcctcgtcgccgccggcaacggcaacgccaaggccaaggacgacgccgccgccatgtgctcctgctcctccgacaccgagatcttgtgcagatga

SEQ ID NO: 958 - protein, 134 aa, Oryza sativa
MEDHQGGGVGRASNKIRDIVRLQQLLKRWKKLATMAPGGRSGVPKGSFAVYVGEEMRRFVIPTEYLGHWAFERLLRDAEEEFGFRHQGALRIPCDVAAFEATLRLVAAGNGNAKAKDDAAAMCSCSSDTEILCR

SEQ ID NO: 959 - DNA, 423 bp, Oryza sativa
atgatggtgatgggctacttgctggcgcccaagaagggcgggaggaggaggagggggaaggatcagccgtcggcggcggcgcatcacggcgataacgacgatggactccgggagacgctgctggagcagcagcagcagccggcgtcgtcgtcgtcgccgacggccggtggcggcggcgtgccgaaggggtacttcgcggtgtacgtcggcgaggaggcgcggcggttcgtggtgcccacggggtacctccgcgagccggcgttccgggacctcatggagcgcgccgccgacgagttcggcttcgcccaggccggcggcctccgcgtgccctgcggcgaggacgacttcgaggatctcctccgccgcctccgccgcaagaacggcggcgccgccgccgccaaggctaagaaagccatcagctag

SEQ ID NO: 960 - protein, 140 aa, Oryza sativa
MMVMGYLLAPKKGGRRRRGKDQPSAAAHHGDNDDGLRETLLEQQQQPASSSSPTAGGGGVPKGYFAVYVGEEARRFVVPTGYLREPAFRDLMERAADEFGFAQAGGLRVPCGEDDFEDLLRRLRRKNGGAAAAKAKKAIS

SEQ ID NO: 961 - DNA, 426 bp, Oryza sativa
atgggtgtgcacttgctgaagaggcagcagtcatcggcgtcggcggggggctcgtcggcggggggagggatgccgccgaaggggtgcatggcggtgagggtggtggggcccggcggcgtgggcggcggcggaggaggagcggagggagagaggttcgtggtgccggtgggttatctgaagcacccgctgttcgtggggctcctcaaggaggccgaggaggagttcgggttcgagcagaagggcgccatcaccatcccctgcggcgtcgaccacttccgccgcgtccagggcatcatccaccaccagaagcaccaccacggcggctcccatggcgccggcggcgccggcgccggcggcctcctctccggccacggctcgtcgggacaccacaacaacttccacatcgccgcctgcttcagggcctga

SEQ ID NO: 962 - protein, 141 aa, Oryza sativa
MGVHLLKRQQSSASAGGSSAGGGMPPKGCMAVRVVGPGGVGGGGGGAEGERFVVPVGYLKHPLFVGLLKEAEEEFGFEQKGAITIPCGVDHFRRVQGIIHHQKHHHGGSHGAGGAGAGGLLSGHGSSGHHNNFHIAACFRA

SEQ ID NO: 963 - DNA, 522 bp, Oryza sativa
atggcggcggcggcgaggtcgtcgacgaagggggtgaggaggacgaagagcctgatatcgaggacgctggagcggtgcaagtccgggctgagcagcggcggcggcggcaggtcggcggcggcgccggtggccgggtgcttctcggtgtacgtggggccggagcgggagcggttcgtggtgcgcaccgagtacgccaaccacccgctgttccggcggctgctcgacgacgccgagcgcgagtacggctacgcggcgcaggggcccctcgcgctgccgtgcgccgtcgacgcgttcctcgacgtgctctggcagatggagcgcgacggctgcggcggcggcggcgacgacgacgacgacctctccatcggcggcggcggcgcggcgtcgccgatatgcggcctcccgagctgcggcagcaagggccgcgcggcggccgccggctaccgcatgctgagcccggcgaggatgacgtcgatcttgtcgaggtcgtctcccatggcgacgccgagcaggaagaggtga

SEQ ID NO: 964 - protein, 173 aa, Oryza sativa
MAAAARSSTKGVRRTKSLISRTLERCKSGLSSGGGGRSAAAPVAGCFSVYVGPERERFVVRTEYANHPLFRRLLDDAEREYGYAAQGPLALPCAVDAFLDVLWQMERDGCGGGGDDDDDLSIGGGGAASPICGLPSCGSKGRAAAAGYRMLSPARMTSILSRSSPMATPSRKR

SEQ ID NO: 965 - DNA, 363 bp, Oryza sativa
atggtgagctcactgaggctagccgagatctccaggaagtggagcgggtcagggtcgagcaaggtgacgtcgccgacggcggcggcggcggcgtgcccgcgggggcacttcgcggcgtacacccgggacggcagccggttcttcgtccccatcgcctgcctcgccagcgacaccttccgggagctcctcagcacggcggaggaggagttcggctcccccggcggccgccccatcgtgctcccttgctccgccgaccgcctccaccagatcctcgccgccttccgctccgcctccggcaagaacaagtgctcgccgccgtccggctccggcggccgcgccggcggcaggaccaagatttggtag

SEQ ID NO: 966 - protein, 120 aa, Oryza sativa
MVSSLRLAEISRKWSGSGSSKVTSPTAAAAACPRGHFAAYTRDGSRFFVPIACLASDTFRELLSTAEEEFGSPGGRPIVLPCSADRLHQILAAFRSASGKNKCSPPSGSGGRAGGRTKIW

SEQ ID NO: 967 - DNA, 330 bp, Oryza sativa
atggcggggaagctgtaccagctgatgtcgaggatgcacctggcgaggagccggtcgtcgtcgtcgtcggcggcgacggcggcggcggcggcggcggacgtgccgagggggcatttcgcggtgtacgtcggcgagaggcggaagcggttcgtgatcccgacggcttacctgaagcacccgtcgttcgtgctgctgctgaagcgggtggaggaggaattcggcttcgactgccaccgctgcggtggcctcaccatcccctgcgccaccgagggcgacttcgcctccttcgtcgccgaagccatcgcctccgacgaccaccaccaccactag

SEQ ID NO: 968 - protein, 109 aa, Oryza sativa
MAGKLYQLMSRMHLARSRSSSSSAATAAAAAADVPRGHFAVYVGERRKRFVIPTAYLKHPSFVLLLKRVEEEFGFDCHRCGGLTIPCATEGDFASFVAEAIASDDHHHH

SEQ ID NO: 969 - DNA, 309 bp, Oryza sativa
atgggaggtaagctgcagcatctcatggagaggcttcacctggctgggaagggcggcggcggcggcgcggcgagggacgtgccgaggggacacttcgcggtgtacgtcggcgaggctcgggcgaggttcgtggtgccgacggcgtacctgaggcagccggcgttcgtggcgctgctgaagagcgtggaggaggagtacggcttcgaccactgcggcggcggcggcctcaccatcccctgctccgagcgcgacttctccgccctcctcggccgcctcgcctcctcgccgccgccgccgtcgtggcgttga

SEQ ID NO: 970 - protein, 102 aa, Oryza sativa
MGGKLQHLMERLHLAGKGGGGGAARDVPRGHFAVYVGEARARFVVPTAYLRQPAFVALLKSVEEEYGFDHCGGGGLTIPCSERDFSALLGRLASSPPPPSWR

SEQ ID NO: 971 - DNA, 402 bp, Oryza sativa
atggggaagggaggcgggctgagcaagctgaggtgcatgatcaggaggtggcactcgtcgagccgcatcgcgcgggcgccgccgtcggcgggggagctggaggagggctctgcggcggcggcggggagggcggcgtcgttccacggcgcggacgaggtgcccaaggggctccacccggtgtacgtcggcaagtcgcggcggcggtacctcatcgccgaggagctcgtcggccacccgctgttccagaacctcgtcgaccgcaccggcggcggcggcggcggcggcgccgcgaccgtcgtcggctgcgaggtcgtgctgttcgagcacctgctctggatgctggagaacgccgacccgcagccggagtccctcgacgagctcgtcgagtactacgcctgctga

SEQ ID NO: 972 - protein, 133 aa, Oryza sativa
MGKGGGLSKLRCMIRRWHSSSRIARAPPSAGELEEGSAAAAGRAASFHGADEVPKGLHPVYVGKSRRRYLIAEELVGHPLFQNLVDRTGGGGGGGAATVVGCEVVLFEHLLWMLENADPQPESLDELVEYYAC

SEQ ID NO: 973 - DNA, 432 bp, Oryza sativa
atgaaggagagaggtgtgaggaacaagcagggagtgatcatgaaggccctgctggacaggtgtttgtccaagcacaggaatggtggctggccggagccgccggaggggagcttcgcggtgtacgtcggcggcggcggcggcggcggaggggcggcgagggagaggttcgtggtgaggacggagtgcgtgaaccacccgctgttcagggcgctgctggaggaggccgaggaggagtacgggtacgtggcggacggcccgctcgagctcccctgcgacgccggcgagttcgtcgccgtcctggcgaggatcgagcgtgagatggccgaggagaggacggtcgggtgcgccggcggcctggtgttcaggctgcacccggcggcgcacctcatgctggttgctccggcgacgccgccgccgatgatcgttggctga

SEQ ID NO: 974 - protein, 143 aa, Oryza sativa
MKERGVRNKQGVIMKALLDRCLSKHRNGGWPEPPEGSFAVYVGGGGGGGGAARERFVVRTECVNHPLFRALLEEAEEEYGYVADGPLELPCDAGEFVAVLARIEREMAEERTVGCAGGLVFRLHPAAHLMLVAPATPPPMIVG

SEQ ID NO: 975 - DNA, 432 bp, Oryza sativa; identical to SEQ ID NO: 973

SEQ ID NO: 976 - protein, 143 aa, Oryza sativa; identical to SEQ ID NO: 974

SEQ ID NO: 977 - DNA, 432 bp, Oryza sativa
atgatcagctccaagaagctagttcagctttccaagaagtggcagggaatgggtgccatcgggaggaagagggtgacggcatcggagaaggagatcatccaccactcatcctgcagctcatccgtcgccgggaagggcaactgcgtcgtctactcgtgcgacgggaggcggttcgagatcccgctggcgtacctccgcacgccggtgttcgtggagctcctgaggatgtcacaggaggagtttgggttcagcagcgatggtaggatcacactgccgtgcgacgccgcggtgatggagtatgtcatgtgtttgctcgggagagaggcctcggaggaggttgagaaggctctcctcagttccattgtgatgccctgcagccaccacccaagcaggatggcgcagcaccagcattttgctgtatgcagcatctga

SEQ ID NO: 978 - protein, 143 aa, Oryza sativa
MISSKKLVQLSKKWQGMGAIGRKRVTASEKEIIHHSSCSSSVAGKGNCVVYSCDGRRFEIPLAYLRTPVFVELLRMSQEEFGFSSDGRITLPCDAAVMEYVMCLLGREASEEVEKALLSSIVMPCSHHPSRMAQHQHFAVCSI

SEQ ID NO: 979 - DNA, 498 bp, Oryza sativa
atggcgaagggcgggctgagcaagctcaagtgcatgatcaagaggtggcactcgtcgagcaggatctcccgcacgccgtcggggtgctcggcgtcggcggggtcgacgtcggcgcgcagctcgcacggcggcggacgcgtcggcggggaggaatgggggcgcagcgtcgtggcgagcggcggcggagggggaggaggaggaggagggcgcggcgggtcggtgtcgttccacggcgcggacggcgtgcccccggggctccacccggtgtacgtcggcaagtcgcgccgccgctacctcatcgccgccgacctcgtcggccacccgatgttccagaacctcgtcgaccgctccggcggcggcggcgtggggggcggcggcggcggcggcaccgtcgtcggctgcgaggtcgtgctgttcgagcacctcctctggatgctggagaacgccgacccgcagccggagtcgctcgacgagctcgtcgagtactacgcgtgctga

SEQ ID NO: 980 - protein, 165 aa, Oryza sativa
MAKGGLSKLKCMIKRWHSSSRISRTPSGCSASAGSTSARSSHGGGRVGGEEWGRSVVASGGGGGGGGGGRGGSVSFHGADGVPPGLHPVYVGKSRRRYLIAADLVGHPMFQNLVDRSGGGGVGGGGGGGTVVGCEVVLFEHLLWMLENADPQPESLDELVEYYAC

SEQ ID NO: 981 - DNA, 573 bp, Oryza sativa
atgggcgacgatggcggcggcgtgaaggtggcggcggcggcggcgacgacggcgacggggatgaagcagatcacgcggctgagggagctgctgcagaaatggcaggcgatggcgctgggggcgaataagggtgatgttgccaccgccggagacgaggaagacgaggaggtggtggaggtggctccggcggcggcggcggcggcggcgataccgccgttcgtgatgaggcggctgcagaggacggtgacggtggactccgacgacgagagctgccagagcccggagccgccggcggacgtgccgagggggtactgcccggtgtacgtggggccggagcagcggcggttcgtgatcccgacgaggtacctcggccacccggtgttccggctgctgctggagaaggcggaggaggagttcggcttctgccaccagggcgcgctcgccatcccctgcgagaccgaggccttcaagtacatcctccagtgcgtcgagcgccacgacaacggcctcgccgccggcgacgtcgtcgacggcgtcgtcgacgtcaacgaccgtgcgccgccgcgcgactag

SEQ ID NO: 982 - protein, 190 aa, Oryza sativa
MGDDGGGVKVAAAAATTATGMKQITRLRELLQKWQAMALGANKGDVATAGDEEDEEVVEVAPAAAAAAAIPPFVMRRLQRTVTVDSDDESCQSPEPPADVPRGYCPVYVGPEQRRFVIPTRYLGHPVFRLLLEKAEEEFGFCHQGALAIPCETEAFKYILQCVERHDNGLAAGDVVDGVVDVNDRAPPRD

SEQ ID NO: 983 - DNA, 516 bp, Oryza sativa
atgccacttcaaaccatccataaactgaagcaccaatacactcacaacaaaagctcatctcatcagaagaaacacaccatgatcaatcctaagaggctagttcacctggcaaagaagtggcaacatatggcagctcttgggaggcggaggctgacgataacgggagcaactaaagaaggcaacctacgctgctcatcagccatcgcagataagggccactgcatcatctatacagctgatggagagcgatttggggttccattgacatatctgagtacaactgtgtttggcgaactcctaaggttgtctgaggatgaatttggattcacaggtgaggaaaagatcacacttccttgtgaggcagcagtgatggagtatgtgatgtgcttgcttaggagaaagccctcggaagaggtggaacaggctgttgtgagctctgtcgtaatgccatgtaattacaagagtagcactagcatggtttcagtcaatcttagccagtcactagctatattttag

SEQ ID NO: 984 - protein, 171 aa, Oryza sativa
MPLQTIHKLKHQYTHNKSSSHQKKHTMINPKRLVHLAKKWQHMAALGRRRLTITGATKEGNLRCSSAIADKGHCIIYTADGERFGVPLTYLSTTVFGELLRLSEDEFGFTGEEKITLPCEAAVMEYVMCLLRRKPSEEVEQAVVSSVVMPCNYKSSTSMVSVNLSQSLAIF

SEQ ID NO: 985 - DNA, 363 bp, Oryza sativa
atggggtacttccgggcgccgaggaggaaggcggcggcggcggcggagggggagagcgtgcgggcggcgctgctcgtcggcggcggcggcgaggaggcggcggtgccgaaggggtacttcgcggtgtacgtgggcgcggaggcgaggcggttcgtggtgccgacgagctacctccggcagccggcgttccggggcctcatggagctcgccgccgacgagttcggcttcgcccaggagggcggcctccgcctcccctgccgcgaggaggacttccaggccaccgtcgccgcgctcgacgcgcgccgccgcccggcgagcggcggcgcgatcatgagcaccatggtcaaggccaggtcgttgtag

SEQ ID NO: 986 - protein, 120 aa, Oryza sativa
MGYFRAPRRKAAAAAEGESVRAALLVGGGGEEAAVPKGYFAVYVGAEARRFVVPTSYLRQPAFRGLMELAADEFGFAQEGGLRLPCREEDFQATVAALDARRRPASGGAIMSTMVKARSL

SEQ ID NO: 987 - DNA, 417 bp, Oryza sativa
atgatacattccaagaggcttgctcagctggcgaggaggctgcagagggtcaagacgacggccgccagggaagacgacgcctgctgcacgacttctccggttgcagacaagggccgttgcaccatgtacacggcagacgggaggcggttcaaggtgccattgccgtacctcggaacaacggtcttcggcgagctcctgaggatgtcacaagaggaattcgggttcgccggtgatgggaggatcacactgccctgtgatgcggccgtgatggagtatgtcatgtgcttgctgaggagaaatgcatcggaggatgttgagagggcgttcctgagctctgtagtgatgtcttgccaagattcaagctgtggagtgccacctgtggccttgcaccaacaattttcagtttgtagctcctga

SEQ ID NO: 988 - protein, 138 aa, Oryza sativa
MIHSKRLAQLARRLQRVKTTAAREDDACCTTSPVADKGRCTMYTADGRRFKVPLPYLGTTVFGELLRMSQEEFGFAGDGRITLPCDAAVMEYVMCLLRRNASEDVERAFLSSVVMSCQDSSCGVPPVALHQQFSVCSS

SEQ ID NO: 989 - DNA, 426 bp, Oryza sativa
atgatcagtgcaaagaagcttgctcagttggccaagaagttgcagatgaggatggcatcagccggtggtagccgacagaaggcggtggtcgccgccgatgattgctgcagcacggcgtctctatccctcgccggcaagggccactgcgcggtgtacaccgccgacggcgcgcggttcgaggtgccattgccgtacctaggcacgccgctcttcggcgagctcctgaccatgtcccgggaggagttcggcttcgccggcgacgacggcaggatcacgttgccgtgcgatgcgtcggtgatggagtacgtcatgtgcttgcttagcagagatgcctctgaagaggtcgagagggcgttcttgagctccatggcgaggccctgccgcaatatcggagtaatcagccaccaatttgctgtttgtacttag

SEQ ID NO: 990 - protein, 141 aa, Oryza sativa
MISAKKLAQLAKKLQMRMASAGGSRQKAVVAADDCCSTASLSLAGKGHCAVYTADGARFEVPLPYLGTPLFGELLTMSREEFGFAGDDGRITLPCDASVMEYVMCLLSRDASEEVERAFLSSMARPCRNIGVISHQFAVCT

SEQ ID NO: 991 - DNA, 423 bp, Oryza sativa
atgatccatgcaaagaagcttgctcagttggctaggaagttgcagcagaagatggtgtcagcctcagccggcagtggccggcacacggcaggaaccagccacgattgctgcagcactgcatctcttgccggtaagggccactgcgctgtgtacactgccgacggggcgcggtttgaggtgccattgccgtaccttggcacggcagtctttggcgagctcctgacgatgtctcatgaggagtttggctttgcaagcgaagatgggaggatcacgttgacatgcgacacatctgttatggagtacgtcatgtgcttacttaggagagatgcctctaaagaggttgagagggcgttcttgtgctccatggcgatgccatgccacaatgtcggagtgctcaaccatcaactagctgtttgtacatag

SEQ ID NO: 992 - protein, 140 aa, Oryza sativa
MIHAKKLAQLARKLQQKMVSASAGSGRHTAGTSHDCCSTASLAGKGHCAVYTADGARFEVPLPYLGTAVFGELLTMSHEEFGFASEDGRITLTCDTSVMEYVMCLLRRDASKEVERAFLCSMAMPCHNVGVLNHQLAVCT

SEQ ID NO: 993 - DNA, 435 bp, Oryza sativa
atgatcagtgccaagagactcgctcaaatggtgaagaagtggcaaagaatggcagccttcggcaggaagagacttacatggacggcgcccaaagcaaccgataaatgctgcagttctgtggcagtgaagggccattgcatcatgtacaccgccgatgggaggcggttcgaggtcccgttggcgttcctcgccacgacgatcttcgcagagctcctcaggatctctcaggaggagttcggcttcacaagcgatggagggatcacattgccttgtgatgcagaggttatggagtatgtcatgtgcttgctcaaaagaaatgcatcagaagaagttgtcagggcattcctgagcaccattgtgaagccttgccactatgggagtggctttgcacaatccttgggatttgtccaacaagtagcagcttctagcttctga

SEQ ID NO: 994 - protein, 144 aa, Oryza sativa
MISAKRLAQMVKKWQRMAAFGRKRLTWTAPKATDKCCSSVAVKGHCIMYTADGRRFEVPLAFLATTIFAELLRISQEEFGFTSDGGITLPCDAEVMEYVMCLLKRNASEEVVRAFLSTIVKPCHYGSGFAQSLGFVQQVAASSF

SEQ ID NO: 995 - DNA, 426 bp, Oryza sativa
atgatcagtgccaggagacttgctcaactggccaagaagtggcagaggatggcggcacttgaaaggaagaggctcacaatgaaagccaaagaaaatgaagagtgctgcacatctgtagcaggcaagggccactgtgtcatgtacacagcggacgggagccgattcgaggtcccgttggcgtacctcggcactgcagtcttcagtgagctcctcaggatgtcacaggaggagtttggtttcacgagcgatggcaggatcatgttgccttgtgatgctgtggtaatggagtatgccatgtgcttgctcaagagaaatgcttcagctgaggtggagaaagcattgctgagctccatggtggcaccttgccactacaccggttgtatggtgccaaccgttggagtcaaccagcatatttcttgcttgtag

SEQ ID NO: 996 - protein, 141 aa, Oryza sativa
MISARRLAQLAKKWQRMAALERKRLTMKAKENEECCTSVAGKGHCVMYTADGSRFEVPLAYLGTAVFSELLRMSQEEFGFTSDGRIMLPCDAVVMEYAMCLLKRNASAEVEKALLSSMVAPCHYTGCMVPTVGVNQHISCL

SEQ ID NO: 997 - DNA, 423 bp, Oryza sativa
atgatcagcgccaagagactggttcaattggcaaagtggcagaggatggcagcccttggaaggaagaggatcatgggaaaggcccaagaaactgaagaatgctccacttctgtagcagtcaagggccactgcgtcatgtacacagctgatgggaggcggtttgaggtcccattggcgtaccttggcacagtggtcttcagtgaactcctgaggatgtcccaggaggagtttggcttcacaagcgacgggagaattgtgttgccttgtgatgctgcagaaatggagtatgccatgtgcttgctcaagaggaatccatcggtcgaggtggtggatgcattgctcagctctatgctgatacgttgccactgcactggtagtatggtgccaactgtcggagtcaaccagcaaatttcctgcttgtag

SEQ ID NO: 998 - protein, 140 aa, Oryza sativa
MISAKRLVQLAKWQRMAALGRKRIMGKAQETEECSTSVAVKGHCVMYTADGRRFEVPLAYLGTVVFSELLRMSQEEFGFTSDGRIVLPCDAAEMEYAMCLLKRNPSVEVVDALLSSMLIRCHCTGSMVPTVGVNQQISCL

SEQ ID NO: 999 - DNA, 333 bp, Oryza sativa
atgatcagcgccaagagattggttcaattggcaaagaagtggcaaaggatagctgcccttggaaggaagaggatcatggcaaaggcccaagaaactgaagaatgctccacttctgtagcagtcaagggccactgcgtcatgtacacagctgatgggaggcggttcgaggtcccgttgacgtaccttggcaccgcggtcttcagtgaactcctgaggatgtcccaggaggagttcggtttcacaagcgacggcagaatcgtgttgccttttgatgctgagagatggagtatgccatgtgcttgctcaagagaaatccctcagtcgaggtggtga

SEQ ID NO: 1000 - protein, 110 aa, Oryza sativa
MISAKRLVQLAKKWQRIAALGRKRIMAKAQETEECSTSVAVKGHCVMYTADGRRFEVPLTYLGTAVFSELLRMSQEEFGFTSDGRIVLPFDAERWSMPCACSREIPQSRW

SEQ ID NO: 1001 - DNA, 474 bp, Oryza sativa
atgatcagcgccaagagacttgttcagctggccaagaagtggcaaaggatggcagcccttgggaggaagagggtcatggcagcagctcaagaaactgaagaatgctccacttctgtagcagtcaagggccattgcgtcatgtacacagctgacgggaggcggttcgaggtcccattggtgtaccttggcatgagggtcttcattgaactcctgaggatgtcccaggaggagtttggcttcacgagcgatggcagaatcatgctgccttgtgatgctgcagagatggagtatgccatgtgcttgctcaagagaaatgcctcagctgatgtggtgaatgcattgctaagctctatgctgacatcttgccgctacactgctactgaagtcatgcatgttgaggccctgattctgattcctttatgtggcttacctggaatggtccaatcatgcagaatgcatggcaagtttctctga

SEQ ID NO: 1002 - protein, 157 aa, Oryza sativa
MISAKRLVQLAKKWQRMAALGRKRVMAAAQETEECSTSVAVKGHCVMYTADGRRFEVPLVYLGMRVFIELLRMSQEEFGFTSDGRIMLPCDAAEMEYAMCLLKRNASADVVNALLSSMLTSCRYTATEVMHVEALILIPLCGLPGMVQSCRMHGKFL

SEQ ID NO: 1003 - DNA, 435 bp, Oryza sativa
atgatcagcaccaagagaattgctcaactagcaaagaagtggagaaggatggcagccaagggaaggaagcggcttacaatgatggcaccacaagaagctgaaggatgctcaacaatggtggcaggcaagggctactgcatcgtatacaccgcagatggcatgcggtttgaggtgccactgcggtacctcggcacgatggtcttcggtgagctcctgaggatgtcacaggaggagtttggcttcacgagtgatggaaagatcacattaccatgtgatgccatggtgatggagtacgtgatgtgcttacttagaagaaatgcttcagtagatgttgagaaggcattcttgagctccatggcgatttcgtgccactatgcaaacagtacgacaccgtctctgggagtaaacatgcaagttgctatttgcagctcctag

SEQ ID NO: 1004 - protein, 144 aa, Oryza sativa
MISTKRIAQLAKKWRRMAAKGRKRLTMMAPQEAEGCSTMVAGKGYCIVYTADGMRFEVPLRYLGTMVFGELLRMSQEEFGFTSDGKITLPCDAMVMEYVMCLLRRNASVDVEKAFLSSMAISCHYANSTTPSLGVNMQVAICSS

SEQ ID NO: 1005 - DNA, 393 bp, Oryza sativa
atgggagagcaaggaggcagggcaagcagcaacaagatcagggacattgtgaggctgcaccagcttctcaagaggtggaagagggctgcacttgcaccaaaggccggcaagaacaacaatggcggcggtgcatcggtcccgaaagggttcttcgcggtgtgcgtcggggaggagatgaggaggtttgtcatccccacagagtatcttggccactgggcatttgagcagctactcaggaaggcagaggaggagtttgggttccagcatgagggagctctgaggattccatgtgatgttgaggtgtttgagggtatcttgaggctggttggcaggaaggatgagaaggcagcaatgtgctactcttcttcagagcatgagatcttgtgcagatga

SEQ ID NO: 1006 - protein, 130 aa, Oryza sativa
MGEQGGRASSNKIRDIVRLHQLLKRWKRAALAPKAGKNNNGGGASVPKGFFAVCVGEEMRRFVIPTEYLGHWAFEQLLRKAEEEFGFQHEGALRIPCDVEVFEGILRLVGRKDEKAAMCYSSSEHEILCR

SEQ ID NO: 1007 - DNA, 435 bp, Oryza sativa
atgatccattccaagaagctcgctcagcttgcgaggaagctgcagaggatcaagacggccgccagcaacagggaggacgacgacgccggctgcacgtcgacctcgccgtcgccggtggcggacaagggccactgcgccgtgtacacgtccgacggggcgcggttcgaggtgccgttgccgtacctcggcacgacggtgttcgtcgagctcctgaggatgtcgcaggaggagttcgggttcgccggcggcgacggaaggatcacgctgccctgcgacgcggcggcgatggagtacgtgatgtgcttgctgaggaggaacgcgtcggaggaggttgagagggcgttcctgagctcggtggtgacgatgccttgccagaattcaggctgcacgatgccacctgtggcgttgcaccatcagtttgcagtttgtagctaa

SEQ ID NO: 1008 - protein, 144 aa, Oryza sativa
MIHSKKLAQLARKLQRIKTAASNREDDDAGCTSTSPSPVADKGHCAVYTSDGARFEVPLPYLGTTVFVELLRMSQEEFGFAGGDGRITLPCDAAAMEYVMCLLRRNASEEVERAFLSSVVTMPCQNSGCTMPPVALHHQFAVCS

SEQ ID NO: 1009 - DNA, 426 bp, Oryza sativa
atgatcagtgccaggagagttgctcagctggccaagaagtggcagaggatggcagcactcggaaggaagaggctcacagtgagagccaaacaagatcaagaatgctgcagttccatggcaggcaagggccactgcgccatgtacacggcggacgggagccgattcgaggtcccgttggcgtacctcggcacggcggtcttcagtgagctcctccggatgtcacaggaggagtttggtttctcgatcgatggcaggatcatgctgccttgtgatgctgctgtgatggagtatgccatgtgcttgctcaggagaaatgcttcggttgaggtggagaaagcattgctgagctccatggtggcatcttgccactacactggttctatggtgccaactgttggagtcaatcagcaaatttcctgcttgtag

SEQ ID NO: 1010 - protein, 141 aa, Oryza sativa
MISARRVAQLAKKWQRMAALGRKRLTVRAKQDQECCSSMAGKGHCAMYTADGSRFEVPLAYLGTAVFSELLRMSQEEFGFSIDGRIMLPCDAAVMEYAMCLLRRNASVEVEKALLSSMVASCHYTGSMVPTVGVNQQISCL

SEQ ID NO: 1011 - DNA, 435 bp, Oryza sativa
atgatcagtgccaagaggctcgctcaaatggcaaagaagtggcaaagaatagcagccctcgggaggaagaggatcacatggacgacacccaaagcaaccgatgaatgctgcagttctgtggcagtgaagggccattgcatcatgtacactgctgatgggcggcggtttgaggtcccgttggcgttcctcgccacgacgatcttcgcagagctcctcaggatgtctcaggaggagtttggcttcacaaccgatggagggatcacattgccttgtgatgcagaggtcatggagtatgtcctgtgcttgcttagaagaaatgcatccgaggaagttgtcagggcattcctgagcaccattgtgaaatcttgccactatgggaatggctttgcacaatccttggggtctgtccaacaagtagcagcttctagcttctga

SEQ ID NO: 1012 - protein, 144 aa, Oryza sativa
MISAKRLAQMAKKWQRIAALGRKRITWTTPKATDECCSSVAVKGHCIMYTADGRRFEVPLAFLATTIFAELLRMSQEEFGFTTDGGITLPCDAEVMEYVLCLLRRNASEEVVRAFLSTIVKSCHYGNGFAQSLGSVQQVAASSF

SEQ ID NO: 1013 - DNA, 426 bp, Oryza sativa
atgatcagttcaaggaagcttgctcaattgggcaagaagtggcagaggatggtggcatccagtgggcggcagactgcaagcatcgatggatgctgcagcacagccacagcgtatgtcgcagacaagggccattgtgtgttgtacaccactgatggggcacgcttcgaggttccactgatgtacctcaacacggcgatcttctgtgagctcttaagggtgtctcaagaggagtttggctttgcaagcaacaacaagatcacattgccttgtgatgcctcagtgatggagtacgtgatgtgtttgattaggagagatgcctctgaagagattgagaaggcgctcctgagctccatagttaggccatgtcttaatactagtgtggttccaccaatgagactcaatcagcaatttgctgtttgcagctag

SEQ ID NO: 1014 - protein, 141 aa, Oryza sativa
MISSRKLAQLGKKWQRMVASSGRQTASIDGCCSTATAYVADKGHCVLYTTDGARFEVPLMYLNTAIFCELLRVSQEEFGFASNNKITLPCDASVMEYVMCLIRRDASEEIEKALLSSIVRPCLNTSVVPPMRLNQQFAVCS

SEQ ID NO: 1015 - DNA, 453 bp, Oryza sativa
atggccatgatcagcgccaagaggattgctcagctagcaaagaaatggcgaaggatggcagcactggggaggaagaggcttacaatgtcgtcgacggcgatggcgacggaagaagcccaaggttgctccacggcggtggccggcaagggtcactgcgccatctacaccgccgacggcgcgcggttcgaggtgccattggcgtacctcggcacggcggtcttgggcgagctcctgaccatgtctcgggaggagtacggcttctccggcgacggcaagatcacgctgccgtgtgacgccatggtgatggagtacgtgttgtgcttgctcggaagaaacgcttcggcagaggttgagaaggcgttcttgagctccatggtgatgccgtgccactatgcaagctgtgtgacaccatctctgggagcttgtcagcaagttgctgtttgcagtaactag

SEQ ID NO: 1016 - protein, 150 aa, Oryza sativa
MAMISAKRIAQLAKKWRRMAALGRKRLTMSSTAMATEEAQGCSTAVAGKGHCAIYTADGARFEVPLAYLGTAVLGELLTMSREEYGFSGDGKITLPCDAMVMEYVLCLLGRNASAEVEKAFLSSMVMPCHYASCVTPSLGACQQVAVCSN

SEQ ID NO: 1017 - DNA, 378 bp, Oryza sativa
atgcacgggaagcatcagcatcagcagcagcagcagcagcagggggggatggtggtggtggcgccgaaggggtgcgtgacggtgagggtgggggcggagggggaggagcagcggcggttcgccgtgccgctcgcccacctcaagcacccgctcttcggggcgctgctcgaggaggccgagcgcgagtacggcttcgcgcagcggggcgccatcgccatcccctgccgcgtcgaccgcttcgtccacgtcgagcacctcatcgtccaggacctccacggcgccgccgcctcccacctcctcgacctcgactcctcctcccaccaccacacccagatccacctccacctcccccgcttcgccggttgcttccgcgcctga

SEQ ID NO: 1018 - protein, 125 aa, Oryza sativa
MHGKHQHQQQQQQQGGMVVVAPKGCVTVRVGAEGEEQRRFAVPLAHLKHPLFGALLEEAEREYGFAQRGAIAIPCRVDRFVHVEHLIVQDLHGAAASHLLDLDSSSHHHTQIHLHLPRFAGCFRA

SEQ ID NO: 1019 - DNA, 522 bp, Oryza sativa
atgaacaggttcagaaatgtgttgctacgaaagtgcaagagcctgtcacgctctctctcgaggtcgagctcctacaggaacctccgatccatgtccacccgggagcacgtcgtcgccggcggcgatggcggcattgtcggcggcggcgacagcaaggcggtgtcggccggcggcgacggggcggtggtgttcgtcgggagctcgcggcggcgctacgtgatcagcaacaagcacctcagccacccgctgatcgccgcgctcatcgacgacgacgtcccggcggcggccgccggagacggaaaagaaggcggcggcggcggtggggtggttgagaggaggaggtcgacgtcggcagcgacgacgacgtcgtcgtcgaccaagccgatcgccgtcaactgcgaggtcgtgctgttcgaccacctactgtggatgctggacaacgccgtcgacctccgcgccggcggcgacggcgacgacgacgacgccgccatgagagagctcgcccagctctacgcctactag

SEQ ID NO: 1020 - protein, 173 aa, Oryza sativa
MNRFRNVLLRKCKSLSRSLSRSSSYRNLRSMSTREHVVAGGDGGIVGGGDSKAVSAGGDGAVVFVGSSRRRYVISNKHLSHPLIAALIDDDVPAAAAGDGKEGGGGGGVVERRRSTSAATTTSSSTKPIAVNCEVVLFDHLLWMLDNAVDLRAGGDGDDDDAAMRELAQLYAY

SEQ ID NO: 1021 - DNA, 393 bp, Oryza sativa
atgaggcagatgatccgacggctctcccgcgtcggcgactgctcgtcgccctcctcgccgccgccattctcgccggcgccacgccgcggaggcggcggaggtgggagcagcgggaagaggtcgtcgtcggcggcggcggcgcacgagggggtacccgaggggcacgtgccggtgtacgtggtcggggagggggatggcggcgaggcggcggcggcggagcggttcgtcgtgcgcgccgagctgctcgggcggccggcgctggccgagctcctccgccgcgccgcgcaggagtacggctacgaccaccacggcccgctccgcatcccctgccgcgccgacgtcttccgcgccgcgctcgccgccgccggcgacgaggacgacgacagcgagtag

SEQ ID NO: 1022 - protein, 130 aa, Oryza sativa
MRQMIRRLSRVGDCSSPSSPPPFSPAPRRGGGGGGSSGKRSSSAAAAHEGVPEGHVPVYVVGEGDGGEAAAAERFVVRAELLGRPALAELLRRAAQEYGYDHHGPLRIPCRADVFRAALAAAGDEDDDSE

SEQ ID NO: 1023 - DNA, 378 bp, Oryza sativa
atgaaggccaagcgcctcctcaagcggctctcccgcgtcgccgacgactcccccgccgccgcggcgtaccagcagctccggccgaagcaggcggcggcggcggcggcgggggggaaggtgccgcaggggcacgtgccggtgtgcgtcggcgaggagggcgggccggtggagaggttcgcggtgagggcggagctcctcgggagcccggcgttcgcggcgctgctccggcgggcggcgcaggagtacgggtacggccaccccggcgcgctccgcatcccctgccccgtcgccgacttccgccgcctcctcctccgcctctccgccgccgccgccgccgccgccgacgaaggcgaatacccctcctcctacgactgctag

SEQ ID NO: 1024 - protein, 125 aa, Oryza sativa
MKAKRLLKRLSRVADDSPAAAAYQQLRPKQAAAAAAGGKVPQGHVPVCVGEEGGPVERFAVRAELLGSPAFAALLRRAAQEYGYGHPGALRIPCPVADFRRLLLRLSAAAAAAADEGEYPSSYDC

SEQ ID NO: 1025 - DNA, 432 bp, Oryza sativa
atgaaggagagaggtgtgaggaacaagcagggagtgatcatgaaggccctgctggacaggtgtttgtccaagcacaggaatggtggccggccggagccgccggaggggagcttcgcggtgtacgtcggcggcggcggcggcggcggaggggcggcgagggagaggttcgtggtgaggacggagtgcgtgaaccacccgctgttcagggcgctgctggaggaggccgaggaggagtacgggtacgtggcggacggcccgctcgagctcccctgcgacgccggcgagttcgtcgccgtcctggcgaggatcgagcgtgagatggccgaggagaggacggtcgggtgcgccggcggcctggtgttcaggctgcacccggcggcgcacctcatgctggttgctccggcgacgccgccgccgatgatcgttggctga

SEQ ID NO: 1026 - protein, 143 aa, Oryza sativa
MKERGVRNKQGVIMKALLDRCLSKHRNGGRPEPPEGSFAVYVGGGGGGGGAARERFVVRTECVNHPLFRALLEEAEEEYGYVADGPLELPCDAGEFVAVLARIEREMAEERTVGCAGGLVFRLHPAAHLMLVAPATPPPMIVG

SEQ ID NO: 1027 - DNA, 291 bp, Oryza sativa
atggcgaagaagatcgcgccggcggccaacctgaagcagatcctgaggaggtgctcgagccttgggaggaggcagcagcagcagggcgcggtgccgaggggccacttcccggtgtacgtcggcgagagccggtgccggtacgtggtgcccatcgcctgcctggagcacccggacttcctgctgctgcttcggaaggccgaggaggagttcggcttcgagcacgacgccgccatcacgcttccctgccacgaggccgactttgaagccctcctcgccgccctgactgcctga

SEQ ID NO: 1028 - protein, 96 aa, Oryza sativa
MAKKIAPAANLKQILRRCSSLGRRQQQQGAVPRGHFPVYVGESRCRYVVPIACLEHPDFLLLLRKAEEEFGFEHDAAITLPCHEADFEALLAALTA

SEQ ID NO: 1029 - DNA, 327 bp, Oryza sativa
atggcgatcacggggtccaagaagccggggcagctcaagcagatgctgcggaggtgctcgtccagcctcgggataaagggcgccggcggcgacgacgatgggctgcctggggacgtgccgaggggccacttcgccgtgtacgtcggcatcagccggagacgctacatcgtgccggtggcgtgccttgcggcgccagagttccaggagcttctcaggaaggccgaggaggagtttggcttcgaccacgacatgggtatcaccctgccctgcgatgaggccaccttccacggcgtcctcgcctccgcctctgccacctccatcagatga

SEQ ID NO: 1030 - protein, 108 aa, Oryza sativa
MAITGSKKPGQLKQMLRRCSSSLGIKGAGGDDDGLPGDVPRGHFAVYVGISRRRYIVPVACLAAPEFQELLRKAEEEFGFDHDMGITLPCDEATFHGVLASASATSIR

SEQ ID NO: 1031 - DNA, 542 bp, Prunus armeniaca
ggcacgagcccaaacatatcttatcaaagccttttcagtttctcaattcatttgaaatcttccttctttgtgttctcatatagaaatcttggaactatgggtttccggttgcctggtgccatacatgctaagaaaacccaagtaccgtcgaagtccttagatgtcccttaaggctattttgcagtctatgttggggagagtcagaagaagcggtttgtgattccactatcatacttgaaccagtcatctttccaagatttgttaagtcaagcggaagaagagtttggatacgatcatccaatgggtggtattacaatcccctgcagtgaagaagccttccttgatctcacctctcgctttggtgtgtgagcaacattcttgacaccaatggctgcagctgtattggctttacttgtctagatcgaaaaaacctttggatcccagttttcaaccaaggcatcttccatgaattgctattaactcaggctgaactgaaggaggggcttggactgatcatccacttattgcatccaacgatgaca

SEQ ID NO: 1032 - protein, 89 aa, Prunus armeniaca
MGFRLPGAIHAKKTQVPSKSLDVPGYFAVYVGESQKKRFVIPLSYLNQSSFQDLLSQAEEEFGYDHPMGGITIPCSEEAFLDLTSRFGV

SEQ ID NO: 1033 - DNA, 478 bp, Prunus armeniaca
ggcacgagtctattgtcacagccttttcttatccaaatatctctttaactctcaagcataacaatccacagaaaccatgggtattagcttgatatcgatcatccgacgatctctcgtgatgtctaagcaatcgagtatggctacaacgaatgtcccgaagggccactttgctgtttatgtaggagaggagcagaaaaagaggcttgtggtaccaatatcatacttgaaccaccagtggttcaaagacttgctaagttgcagtgaagaaaagtttgggttcactcatccaatgggtggcatcacaattccatgcactgaagaggccttcattggtctcagttcttgtttgcattccttctaatcttatgacaaacatgacaaaaaccaaactctttaattttttgccctgaagagttcaatttgtaaatgtcccctttatattctgatactgagaaaattattcaagaccacttcttat

SEQ ID NO: 1034 - protein, 94 aa, Prunus armeniaca
MGISLISIIRRSLVMSKQSSMATTNVPKGHFAVYVGEEQKKRLVVPISYLNHQWFKDLLSCSEEKFGFTHPMGGITIPCTEEAFIGLSSCLHSF

SEQ ID NO: 1035 - DNA, 532 bp, Panax ginseng
  misc_feature (19)..(19): n is a, c, g, or t
  misc_feature (531)..(532): n is a, c, g, or t
gcaagttgcgccattgtgnttggtaccccgggaaattcggccattacggccggggtatgcctcgtattattcatgctaagcaaattcttcgaaagattccattaacagcaaaccgtgctagttcaacaactgtggatgttccaaagggctatttggcagtttatgttggagagcgggaaaagaagagattcgtgattccgatatcattcttgagccagccttgtttccaagacttattaagtcaagcagaggaagaatttggctttgatcatcctatgggtggtctcacaattccctgcagagaggacattttcgttgatctcacttctagtttgagtggattgtgattagtaggagaactaactagcatagtttagtgaaaacaattttgtatagcgatgccagtgatagcaatttatattacagtttttctgtaattctttgccccagaaaatagccttgggttcaatacagtgttctatatgtcttctctgttgatatattacaaaatagaaaaaattgccttcaaann

SEQ ID NO: 1036 - protein, 96 aa, Panax ginseng
MPRIIHAKQILRKIPLTANRASSTTVDVPKGYLAVYVGEREKKRFVIPISFLSQPCFQDLLSQAEEEFGFDHPMGGLTIPCREDIFVDLTSSLSGL

SEQ ID NO: 1037 - DNA, 844 bp, Prunus persica
gtctctctccttgccaagcatcaaagtcttctctgtttcccaagtcctctgaattctttcttgttcaaattttccacttgagaatataaaaaccatgggattccgattgccaggaattgttaactccaagaagggtctaaacaaggctgctacttcaaacaccgtagacatcccaaaaggctactttgcagtgtatgttggggggagccagaagaagcgatttgtggttccaatatcatacttgaatgagcctttgttcttggatttgctaagtcaagcagaagaagaatttggatatgatcatccaatgggtggtatcacaatcccctgcagtgatgaaaccttcattcatctcacttgcagcttaagtgtatgaatgaacgcaaatgaagtgaatctggttcatatccaaatcagcctcagttcgatcagaagaactcgccgtgtcaagatgaagtagaggctgtgattgatcatatgcacatttttctgttgcttatgaatctgggaagccttctttgatggtcaaagtgcttgtgagctgagcacgaagatacaaaatttgtgaagcagtcgaatgacgatatcatgaactctcgattcgaagactattgagcccaaaatcataactccaattttgaactggatgacaaagaagatttgtctttttaagccatgtacaattctaaatagtttattctggcagaaacatgagaaaatgtaatgatatatttttgattcctcatccaccttaattgcctatttttcaataagttattatctaattgtaccttggtgcttcatccaaaaataaaattgggaaataaacaaattttgaacaaaa

SEQ ID NO: 1038 - protein, 99 aa, Prunus persica
MGFRLPGIVNAKRSLIRSRSTSKRTAESKTDIPKGYFAVYVGESQKKRFVIPVSYLNEPLFLDLLSQAEEEFGYDHPMGGITIPCSENTFLDLTSRLRV

SEQ ID NO: 1039 - DNA, 791 bp, Prunus persica
cttcaccttctcaagcaccaaagctttctctgctttccaaatccaagtcctttgaattccctctcttcttttgtcctttgagaatatataagatcatgggtttccggttgcctgcaattgttaacgcaaagagaagtctcattcgatctctatctagttcaagccagacagcagattcaaagactttagatttcccaaaaggctactttgcagtctatgttggggagagccagaagaagcggtttgtgattccgatatcatatttgaatgagcctttattcctggatttgctgagtcaagctgaagaagaattcggatatgatcatcccatgggaggtatcacaatcccctgcagtgaaaacaccttccttgatctcacttcccgcttaagtgtgtgagtgtacacgaatcggtcatccaatctatccaaaccatcctcatttcagagctcactgagccaagatgaaagaatttggatatgatcatatccaaagcatccacatttcagaactcgctgagttgggatgaagaagaggctaccactgctcatccatggaatcaactcacatcttatggtgaaagcaaaccttctcaaatgctgaagctgcttctaggctgagcttttatgaagcagacaagtgatgatattatgaactccctagaaccattggtccaaatatcatcccccacccaaaggcagtcaaattctgtcttttgaacctatgtaaacttctttgttgttctccaggagcaatatacaatctatttgaaatcctcatcctttcttgtct

SEQ ID NO: 1040 - protein, 100 aa, Prunus persica
MGFRLPAIVNAKRSLIRSLSSSSQTADSKTLDFPKGYFAVYVGESQKKRFVIPISYLNEPLFLDLLSQAEEEFGYDHPMGGITIPCSENTFLDLTSRLSV

SEQ ID NO: 1041 - DNA, 831 bp, Prunus persica
tcttcaccttctcaagcaccaaagctttctctgctttccaaatccaagtcctttgaattccctctcttcttttgtcctttgagaatatataagatcatgggtttccggttgcctgcaattgttaatgcaaagagaagtctcattcgatctctatctagttcaagccagacagcagattcaaagactttagatatcccaaaaggctaccttgcagtctatgttggggagagccagaagaagcggtttgtgattccgatatcatatttgaatgagcctttattcctggatttgctgagtcaagctgaagaagaattcggatatgatcatcccatgggaggtatcacaatcccctgcagtgaaaacaccttccttgatctcacttcccgcttgagtgtgtgagtgtatacgaatcggtcatccaatctatccgaaccatcctcatttcagagctcactgagccaagatgaaagaatttggatatgattatatccaaagcatcctcatttcagaactcactgagttgggatgaagaagaggctaccactgctcatccatggaatcaactcacatcttgtggtgaaagcaaaccttctcaaatcctgaaactgcttctaggctgagcagaaacatagaaatttatgaagcagacaagtgataatatcatgaattccctagaaccattgttccaaatatcatccccccacccaagggcagtcaaattctgtcttttaaacctatgtaaacttctttattgttctccaggagcaatgtacaatctatttgaaatcattatcctttcttgtcttatggtttgctttatagtaaaaaaaa

SEQ ID NO: 1042 - protein, 100 aa, Prunus persica
MGFRLPAIVNAKRSLIRSLSSSSQTADSKTLDIPKGYLAVYVGESQKKRFVIPISYLNEPLFLDLLSQAEEEFGYDHPMGGITIPCSENTFLDLTSRLSV

SEQ ID NO: 1043 - DNA, 640 bp, Prunus persica
gcgccaagagaagtctcattcgatctctatgtagttcaagtcagacggttgattcaaagaccttagatatcccaaaaggctattttgcagtctatgttggggagagccaaaagaagcggtttttgattccaatatcttatttgaatgagcctttgttcctggatttgttgagtcaagctgaagaagaatttggatatgatcatcccatgggtggtatcacaatcccctgcagtgaagacaccttccttcatctcacttcccgcttaagtgtatgagtgatcattaagtaatgatgaggacggggctattcttgatcgtccactgagtcgacttacatcttgtgctgagaggaagcaatctgtaagcctgaagctgcttgtgatctgagcataaagttaaaaagttcatgaatccgacaaacgaagatactatggacgttgaaaaactttagtccaaaatcatgatcgaaattttgaactattgtccttgagagtacatacggaacttaaagacgtgcattgtagtataaaagatcttgggcctctccacatttgggttggatgctatgatcttctcatgtgtaacctttgttactctccaggaaaatatattggaatgcaaatttaaatcctgaaaaaaa

SEQ ID NO: 1044 - protein, 93 aa, Prunus persica
MGFRLPGIVNSKKGLNKAATSNTVDIPKGYFAVYVGGSQKKRFVVPISYLNEPLFLDLLSQAEEEFGYDHPMGGITIPCSDETFIHLTCSLSV

SEQ ID NO: 1045 - DNA, 406 bp, Pisum sativum
acaccccgacgcatttgaagttcagatacttgagtcttctacatactgatctttcttttttctagaccaatatcttcttttcaactcatacgagaatgggttttcgtttatctggtatcataagaaggacaacatcttcaaaaggtgtggctgttccaaaggggtatctagcagtatatgttggagagcaacaaaagcggtttttgatcccaatatcatacttgaaccaaccttcatttcaagacttattgaaccaagccgaggaacaattcgaatatgatcatccaatgggcggtctcactattccttgcagagaagaaattttcttagatattacttctcgcttaagtaggtgctaatcccttttgtaagaaggagcaaacatagattatttaacttgaggcaa

SEQ ID NO: 1046 - protein, 87 aa, Pisum sativum
MGFRLSGIIRRTTSSKGVAVPKGYLAVYVGEQQKRFLIPISYLNQPSFQDLLNQAEEQFEYDHPMGGLTIPCREEIFLDITSRLSRC

SEQ ID NO: 1047 - DNA, 410 bp, Populus trichocarpa
tgaattagatacatcaacattaaagtgacaatggctattcgtttgcttggttttctggctaaacaaagcctccgtcggcctgtttcatgcgcccataaagcagcttcaaagtcttcagatgttccaaaaggtttcctagcagtttacgttggggaaactgagaagaagcgatttgtggttccagtatcatatttgaaccaggcttcatttcaagatttgctaagtaaagctgaagaggagtttggttttgatcatccaatgggtggattgactattccctgtgcggaagatactttccttgatgtaacttctagcttgagtagattataaggggtaatttaactgatcacacggaacaattttgcatggcaggaattgccgattgggtgtaaataattttttttactaaa

SEQ ID NO: 1048 - protein, 96 aa, Populus trichocarpa
MAILLKGIMNAKQILRRSNLLANQATEVPKGYFAVYVGESQKKRFTVPISFLNQPSFQELLRKAEEEFGYSHPMGGLTLPCREDTFIDIISGLNLS

SEQ ID NO: 1049 - DNA, 407 bp, Populus trichocarpa
agaatttttgttctacgatcaagaaagacaatggctattcgtttgcctggtctggctaaacaaagtctccgtaggtctttctcgacagcaaataaagcttcatcaaagtatttggatgtaccgaaaggtttcctagctgtttatgtgggagaaaccgagaagaagagatttgtggttccagtttcctatttgaaccagccttcatttcaagatttgctaagtaaggctgaggatgaattcggctttgatcatccaatgggtggtttaaccattccttgtgccgaagagactttccttcatgtcacctctagcttgagtagattctaacttacaagagaggatgttaatctaataattagagaaaaacaatttttgttggcaggattttccaattctatgtaaatgtt

SEQ ID NO: 1050 - protein, 99 aa, Populus trichocarpa
MTRHLAAALAKQILRRSVWNASKPASRSLDVPKGFLAVYIGEREKKRFVVPVSYLNEPSFQDLLTKAEEEFGFNHPMGGLTIPCREDKFIDVLSSLSRS

SEQ ID NO: 1051 - DNA, 386 bp, Populus trichocarpa
cttctacacaccaaaatcaacaagtagaccatggcaattcgtttaactggaagccttgccaagcaaattttccgccgatcttcaaaatcttttgatgtgccaaaaggtttcgtggcagtatacgttggggagaccgaaaagaagcgatttgtggttccagtatcctatctgaaccagcctatatttcaagatttgctatgtaaagctgaagaagagtttggctttgatcatccaatgggtggtttgacaattccttgtagagaagatactttcatccatgtcacttcaagcttgagcagatcatgagagaattcttgaagtcattcactgaagagtgaacagagttttgccttgtaggaaatgcaattcaatgtaaataattttct

SEQ ID NO: 1052 - protein, 99 aa, Populus trichocarpa
MARHFHAILAKQILCRSVWITNKSASRSSDVPKGFLAVYVGEMDKKRFVVPVSYLNEPSFQDLLSKAEEEFGFNHPMGGLTIPCREDTFIDILSSLSRS

SEQ ID NO: 1053 - DNA, 383 bp, Populus trichocarpa
tcttttccttgctcatatccatttgaaataatgggtttccgtttgtctgctattgtacgtgctaagcaaatgctccagctatcaccatcagcttcaagtgtgccaaagggctgcctggcagtttatgttggagaaacacaaaagaagagatttgtaattccagtatcatacttgaaccaagctatatttcaagacttgctaagtcaagctgaagaaaaattcggctatgatcatccaatgggcggtctcactattccatgcagagaagagattttcatggatgtcatttcttgcttaagttaatcataaaagcagagagtaagatagatcaactctaacacagttctgtaaagaagacacttatgagtaccatgtacagacct

SEQ ID NO: 1054 - protein, 90 aa, Populus trichocarpa
MGFRLSAIVRAKQMLQLSPSASSVPKGCLAVYVGETQKKRFVIPVSYLNQAIFQDLLSQAEEKFGYDHPMGGLTIPCREEIFMDVISCLS

SEQ ID NO: 1055 - DNA, 392 bp, Populus trichocarpa
ttgttcttacatttacctccaagcaaaatgatggctattcgcttgcctcgtattcttcaagctaagcaaaatcttcttcgaggatcatctccagctagggatgttcgaaaaggctatattgcagtatatgttggagaagaagagaagaaaagatttgtgattccagtatcacacttgaaccagccttcatttcaagagctgctaagtaaagctgaagaggaatatggatttgatcatcaaatgggtggtctcacaattccttgtcgggaagacatcttcatcgatctcacttctcgcttaaatgcgtcataaaagggacagattaacatatattagagaaaacaattttgtagcatactttacatatcatgtacagattgtaagcagtgtct

SEQ ID NO: 1056 - protein, 94 aa, Populus trichocarpa
MMAIRLPRILQAKQNLLRGSSPARDVRKGYIAVYVGEEEKKRFVIPVSHLNQPSFQELLSKAEEEYGFDHQMGGLTIPCREDIFIDLTSRLNAS

SEQ ID NO: 1057 - DNA, 410 bp, Populus trichocarpa
agagatacaacaacactcaacataaacaccatggccagacattttcatgctattcttgccaaacaaattctatgccgatctgtgtggattacaaataaatcagcttcaagatcttcagatgtaccaaaaggtttcttagctgtatacgttggcgaaatggataagaaacgatttgtagttccagtatcctatctgaatgagccttcatttcaagatttgctaagtaaagctgaagaggagttcggttttaatcatccaatgggtggtttgacaattccctgcagagaagatactttcattgacattctttctagcttgagtagatcataagtcgacttcacaaccatattaatctgagaaaacaattttgtatggccaaaactgccaattgaatgtaaatatttctcttc

SEQ ID NO: 1058 - protein, 92 aa, Populus trichocarpa
MGIRLPGIVNAKQILKRILLSEDTSNVPKGHLAVYVGEAQKKRFTVPISYLKHPSFQNLLSQAEEEFGFDHSMGGLTIPCSEEVFTGLILSM

SEQ ID NO: 1059 - DNA, 389 bp, Populus trichocarpa
ttaattcaataccttcaaaaaaatttcaaaatgggtatccgcttgcctggaattgtcaatgctaaacaaattctgaagcgaattctcttgtcagaggatacttctaatgtgcctaaaggccacttagcagtttatgttggagaagctcaaaaaaagcgatttaccgttccgatttcatatttgaagcatccttcattccagaacttgttaagtcaagctgaagaagagttcggatttgatcattctatgggtggtctcacaattccatgcagtgaagaagtcttcacaggtctcattttaagcatgtagttcttatgacggatgcctaatatagcatagctcagaactgttagagtacagtgaatgacaagtgtaatattggttaataa

SEQ ID NO: 1060 - protein, 93 aa, Populus trichocarpa
MMAIRLPRILQVKQNILRGSSAAKDVRKGYIAVYVGEEEKKRFVIPVSYLNQPSFQDLLSKAEEEFGFEHPMGGLTIPCREDIFIDLTSSLKD

SEQ ID NO: 1061 - DNA, 401 bp, Populus trichocarpa
tttttctagccgaagaacacagagcacacaatggccatccttcttaagggcatcatgaatgctaagcaaattctccgtcgatcaaatttgcttgctaaccaagcaaccgaagttcctaaaggctactttgcggtctatgttggagagagccaaaagaaaagattcacagttccaatttcattcttgaatcaaccttcattccaagaattgctaagaaaagccgaagaagaattcggatatagtcatccgatgggcggtcttacacttccttgccgagaagatacctttattgacatcatttcaggcttgaatttatcataacacagagcaggaattaatttgcttcaaaacttttgtacatcatttacttttgatagagacaaatgggatgggaaatgtcc

SEQ ID NO: 1062 - protein, 98 aa, Populus trichocarpa
MAIRLPGLAKQSLRRSFSTANKASSKYLDVPKGFLAVYVGETEKKRFVVPVSYLNQPSFQDLLSKAEDEFGFDHPMGGLTIPCAEETFLHVTSSLSRF

SEQ ID NO: 1063 - DNA, 392 bp, Populus trichocarpa; identical to SEQ ID NO: 1055

SEQ ID NO: 1064 - protein, 99 aa, Populus trichocarpa
MAIRLLGFLAKQSLRRPVSCAHKAASKSSDVPKGFLAVYVGETEKKRFVVPVSYLNQASFQDLLSKAEEEFGFDHPMGGLTIPCAEDTFLDVTSSLSRL

SEQ ID NO: 1065 - DNA, 392 bp, Populus trichocarpa
ttgttcttacatttacctccaagcaaaatgatggctattcgcttgcctcgtattcttcaagctaagcaaaatcttcttcgaggatcatctccagctagggatgttcgaaaaggctatattgcagtatatgttggagaagaagagaagaaaagatttgtgattccagtatcacacttgaaccagccttcatttcaagagctgctaagtaaagctgaagaggaatttggatttgatcatcaaatgggtggtctcacaattccttgtcgggaagacatcttcatcgatctcacttctcgcttaaatgcgtcataaaagggacagattaacatatattagagaaaacaattttgtagcatactttacatatcatgtacagattgtaagcagtgtct

SEQ ID NO: 1066 - protein, 91 aa, Populus trichocarpa
MAIRLTGSLAKQIFRRSSKSFDVPKGFVAVYVGETEKKRFVVPVSYLNQPIFQDLLCKAEEEFGFDHPMGGLTIPCREDTFIHVTSSLSRS

SEQ ID NO: 1067 - DNA, 375 bp, Phaseolus vulgaris
gattatttgcagccaatcaggcatcttcaaaagcggtggatgcaccaaagggctaccttgcagtctatgttggagagaaaatgaagcggttcatgatccctgtgtcatacttgaaccaaccttcattccagaacttattgagtcaagttgaggaagagtatggatatgagcatcccatgggtggcctcacaattccttgcagtgaagatgtcttccaacatataacttcttgcttgaatggacaataaatctcacaccttaggaggctgacatagactagaattgacatttttgtacattaggcatcttctcaatttgtaaagagctccctttctcaagaaatgaggaaatgaaaaatcatcagattgaaaatat

SEQ ID NO: 1068 - protein, 98 aa, Phaseolus vulgaris
MAIRLPSVLSAKHILRRSSLFPNHAAATSLDVPKGHFAVYVGEGEKKRFVIPVSYLNQPSFQELLSIAEEEFGFSHPMGGLIIPCSQEFFLNITSGLH

SEQ ID NO: 1069 - DNA, 528 bp, Phaseolus vulgaris
tgaaaagtgataaccacactctttcaagctctaaacaatactactatgatggctatatcgttttccaactgcgttgagtgccaaacacattcttcgccgatcgaatctgtttgcaaatcaggcagctgcaacatcagtagatgtgcctaagggctactttgctgtgtatgtaggagagggtgaaaagaagagatttgtgataccagtgtcgttgttgaatcaaccctcatttcagcaactgttaagtatagccgaggaagaatttggattcactcatccaatgggtggccttactattccatgcacacaagacattttttttaacatcacctctggctcacataggctatgacatgatgcagccaaactaaatctgaagatactttttgttgcattgttcttttcctttcaacgtggcgtcaagaaaagttcacccatgcagaaaggtttactgtgtaattggattttcaggttacctttcaaatgtatcataggcaaataacattataaactgatgaaaaacattac

SEQ ID NO: 1070 - protein, 156 aa, Phaseolus vulgaris
MDDGGGSKLSGIRQIVRLKEMFQKWQTVTLGSKESNHDSDVARPGGIPPMINKRLTNVLYCDSDEDSCYSPQPPHDVPKGYLAVYVGPELRRFIIPTSYLSHSLFKVLLEKAAEEFGFDQSGGLTIPCEIETFKYLLNCMENHDDSSAGNTGTVEE

SEQ ID NO: 1071 - DNA, 657 bp, Phaseolus vulgaris
cctactcgacccaactcttcacactttcaaaatccaaactccaaaacgaaaacgcactcactcacacactcagttccgttctgttcttcgttcagaccgttggagaatgtcgccgtcgacgaccgggaactgcagcaaaatccggcgcattgtgcgcgtgcggcaaatgcttctccggtggcggaggaaggcgcggctggcgacgtcggacgttccggcgggacacgtggcggtgtgcgtggggcctagccggaggaggttcatcgtgcgcgccacgtacctgaaccatccgatcttcaagatgcttctcgcgaaagcagaagaagaatacggtttctgcaaccacggtcctctcgctcttccttgcgacgagtctctgttcgaagagcttctccgggtcgtggaccgacccgtacccggattgtacacgctcgaggatttaaggagacggtgccacgtggatgtgtcgagtggcaactctgaatcgtggccgttgcttcgtgatgaactgatctgctgagttgactcggtttccttcacctgaaaatacaatactcatttgtcactaactactttttttggggtttgtaatttttatcctaattaatgatcttgggtgagttttttaggttattagagagattaacgatgataaga

SEQ ID NO: 1072 - protein, 137 aa, Phaseolus vulgaris
MSPSTTGNCSKIRRIVRVRQMLLRWRRKARLATSDVPAGHVAVCVGPSRRRFIVRATYLNHPIFKMLLAKAEEEYGFCNHGPLALPCDESLFEELLRVVDRPVPGLYTLEDLRRRCHVDVSSGNSESWPLLRDELIC

SEQ ID NO: 1073 - DNA, 526 bp, Ricinus communis
aattcggcacgagggatcctctacttgcaaagtaagctttcccttcttctgttgtattatttatttgctattcaacagccatggctattcattttcctgctattgcacatgctaaacagattcttcgtcgatcaaagttgcaagtagctaaagatattccaagaggttatttagcagtatatgttggagaaaaccaaaagaagagattcatagttcctatatcaatgttggatgagccttcttttcaagaattgctaagaagagctgaagaagaattcgggttcaatcatccaatgggtggtcttacaattccttgcagagaagatacctttcttgatattacttcgcgtttgaactgatcttgacttctatgtaaatcatcaaagaaaattttgtagattctacacattttgttttccccttctcttttacactttggatggagcagttttatctgcgaaagaattgtaaagtttttttatactcaagttcttcccaatgagatccaaagaaaattatttcactc

SEQ ID NO: 1074 - protein, 92 aa, Ricinus communis
MAIHFPAIAHAKQILRRSKLQVAKDIPRGYLAVYVGENQKKRFIVPISMLDEPSFQELLRRAEEEFGFNHPMGGLTIPCREDTFLDITSRLN

SEQ ID NO: 1075 - DNA, 810 bp, Ricinus communis
agctgctgtactctttcactccactctccctcactttcaaattgagaaacaaaaagaaaaaaacacttcctctcagctttctctcgctttccgcgaaaatgtcaaaatccaacaaaatccgtcacattgtaagagtacagcaaatgttgaagcggtggcgcagaaaggccagactaaccgcatcatcgcgaggagcagcagcgccggctgatgtaccggctggacacgtggcagtatgtgtaggggagagttacaaaaggtttatcgtacgtgcgacgtaccttaaccatcctatattcaagaacctcctcgtacaagccgaagaagagtacggttttaaaaacatcggacctttaactattccttgcgatgagtctgtctttgaagagatactgcgtgtcgtttcgtcgcgatctgagtctcttcggttctctaatgttgaagaggttcagagatgctgccacgtggatatcattaggagtcatcttgaatttttgagtgaatcaaggccgttgcttcatggttagatatagtgaatcgtttgactcgagtgagttcccgtgttggattaactaactatattcttttttttttaatatagttatttgtattattttaggtttctttttttagttagagaagctatagcttttttttttttctttttctttaatggagatggcaagttggggttgggtttttcttggaaccgagtcatcccgagttgaagataaagcaagggagtggagagaagtattattttatcatctcttgtaaattacgaggctaatttgtcaaaaggatagtaat

SEQ ID NO: 1076 - protein, 161 aa, Ricinus communis
MDDHGGSKVTGIRQIVRLKEILQKWQSVTIGSKAPEPEGGTRSPPGGISPMINKRLKGIQNCCDSDEENCQSPGSPPDVPKGYLAVYVGPELRRFIIPTSYLSHSLFKVLLEKVEEEFGFDHSGGLTIPCEIETFKFLLKCMEHHPKDHQDDSSNEEFINH

SEQ ID NO: 1077 - DNA, 1205 bp, Ricinus communis
aatcatttgccgaccatatcaaacctgtagttattttttctctctttttttattttcctttctcttttgacctaattaaattgaaaattcccattttttttcagttttccccttaaagattctcgtagtagccctttataaagaagggttccgtagcaccaacagttccattcgtccttgcagccataccactaacgccacaccatcactttcccttctgttccgccgccaccaccaccgtcacccttgaacaagaattgattcttgggacgaaaagagacttgtgtttcttagggttgatatatcaggcaagttttaatgaaaatcttcttgtatattaacaaaaatcaagaatatgtcaaacatacccacttctctctctgaagtttgccttactcttttccgtttagccatgtccaccgctgacccatggcccttttcttaaatcttatcatatcgtcctttttgtatattagatttcacaaaaactcggaacaaaaatatccacttgcatttaataaaccgttattttaccatataatcaaatcatgatgaagttcaaaggcttcaagattggaaaacggctggttcggatctccagatggattttcagaaggacccggaacaatcccagatacgacaggctatgctcatcaggaccaacatgcaggctgaagcctctcacgaagcttatcaactggggtcgccgcttgacaaaaggcgcaaaatcactatgctctgcaaaacccgggtcgggttatacccatatcggcgaggagcctatccatgaaaaaccggtgacagtgcctaaaggacacttggcggtttatgtgggtcaaaaagatggggactttcatagagtcttggtacctgtaatctactttaatcatcctctatttggcgagttattaagggaagcggaaagagagtatggattcaatcaacaaggtgggattactattccttgccgatattcggagtttgagagagtccaaactcgaattgcggcagggtccggtgtccgtgcgctgatgcggagacgcaaccactattaaagtggtcggttatgagatgatgacgatgaatgatagttacgtgtagaatttttgaattagaattagatggtgttttgctgttctttttcacttttacagtcttttccattttactaattaagtaattatatggtgtaatggattttttta

SEQ ID NO: 1078 - protein, 168 aa, Ricinus communis
MMKFKGFKIGKRLVRISRWIFRRTRNNPRYDRLCSSGPTCRLKPLTKLINWGRRLTKGAKSLCSAKPGSGYTHIGEEPIHEKPVTVPKGHLAVYVGQKDGDFHRVLVPVIYFNHPLFGELLREAEREYGFNQQGGITIPCRYSEFERVQTRIAAGSGVRALMRRRNHY

SEQ ID NO: 1079 - DNA, 1126 bp, Ricinus communis
gtgtgtgttctctctaggaaagagagctcgctccctttgttctttccctacctaacaaacctgtcattccctaagctccccatggcgtttatctgtaggctcaccagcacctgattctacctcagtggaagaggatctgatgcgacttgtatgtctggaatcagaaacccctgaatttaattctgggattttttcttcacttttgtggtaaaacatttggcaatggatgaccatggtggcagcaaggtgacaggaattaggcagattgtcaggcttaaggaaattctccagaagtggcagtctgttacaattggttcaaaggcccctgaacctgaaggtggaactagaagtcctcctgggggcatttcaccgatgatcaataagaggctgaagggcattcagaactgttgtgattccgacgaggaaaactgccagagccctggatcgccacctgacgtccccaaagggtatctagcggtttatgttgggccagagctgaggaggtttattatccccacaagctatcttagccattctctgttcaaagttttgctagaaaaggttgaagaggagtttgggtttgatcacagtggcgggctcacaatcccatgcgagattgagacctttaagtttctcctgaaatgcatggagcaccatccaaaagaccaccaggatgacagctcaaatgaagaattcattaatcattgaagaatatgattatgctgctctctgtagtggtcgagattttaagactgattacagatgttgagctgggactccttgtatgcagatattttcttttccttttctttcttttttcttattatttttttaaattttcatcgacaaacaataggaaaactttagttaggtttgcacatttgtgcagtgaatttggtactagggggttaagtttagcctctctattcttttttgttgggatttggccttaatgagtacaaagacaggtgtattcgatcaactaatgtttgttacatatttccaaaaggaatctggcatgagctttctttaagttgtttttggtttgcaagtgtccaagattggtgagtcgtacgtaatgatgtctcagtttacttgtacaaggatataattaagatcaatcttt

SEQ ID NO: 1080 - protein, 142 aa, Ricinus communis
MSKSNKIRHIVRVQQMLKRWRRKARLTASSRGAAAPADVPAGHVAVCVGESYKRFIVRATYLNHPIFKNLLVQAEEEYGFKNIGPLTIPCDESVFEEILRVVSSRSESLRFSNVEEVQRCCHVDIIRSHLEFLSESRPLLHG

SEQ ID NO: 1081 - DNA, 737 bp, Ricinus communis
acaacatacacactctctctctctccctctctttctccctctgtctctcttttatattcgctcccaggtatctgaatcctaatcatccctttgtctggaacaactcctactaattgaaggattgaattgggttacagttacggggcaacattgagtttgatcctgctggctctaaaagacacaatgaagcagctcatccgccgtctctctcgtgtcgccgactcttcacagtacagtctcctccgctccgactcttcccgcgctaggtgttcgagatcggcccgccgagcccagtcatttcggtgtttggtgaaatcggcgagaagagtcgctggaggtaaaccggtacctgaaggtcacgtgccggtttatgttggcgatgagatggaacggtttgtcgttagtgcggagctacttaatcatcctatctttatcggacttcttaataaatcggctcaagagtatggttatgaccaaaaaggcgtgctcatgattccttgtcacgtgcttgtttttgaacgagttatggaagcgcttcgactcggacttgactcgcgtgaccttgatgaacttctcggttctttggtcactgatgactacttgcagaactagacaaaaggatccgtgagattatacagagggatccttttttctttttttctatcgttttctttttttaatgtaaatatgccttttgctatgatgataatcaatcacagtcacttttctctctgttt

SEQ ID NO: 1082 - protein, 142 aa, Ricinus communis
MKQLIRRLSRVADSSQYSLLRSDSSRARCSRSARRAQSFRCLVKSARRVAGGKPVPEGHVPVYVGDEMERFVVSAELLNHPIFIGLLNKSAQEYGYDQKGVLMIPCHVLVFERVMEALRLGLDSRDLDELLGSLVTDDYLQN

SEQ ID NO: 1083 - DNA, 861 bp, Solanum lycopersicum
acgcggggataacagctctcaccaaaacttgaaatcatacaaagctttcctctgctttcaaagtcattttacaagttctttccttccttatttgctcatctatattgaactaaacgaccatggctatccgtatgcctcgtataatcaagaagtcttctacaagtggagacgttccgaaaggccactttgctgtttatgtaggggagaagcaaaagaagaggtttgtgatccccatatcattcttgagccaacctttatatcaagacttgcttagtcaagctgaggaagaatttggctttgatcatccaatgggcggtgtcacaattccctgtagtgaggatgtgttcattgatcttacttctcgcttgaataggatctgaggcctttcctttcacaattttgtaaagaactaacctggatttccagtttgtacatcagaagagttagaaaagacatcatatatataccgcgtcttagaaaattagatagaggggattactgtcagatacaacagtagatcccaattcgaattgtaatattcactagtttatgcaatgaaatcttttcatacacatttttatccaatttggtttgatagtaatcttgttgaacaaagttccttgaataactccattttcttcataacatgggaactggagcttctgaagtacaagtctcagattatccaagacatcattttagtatatggcattccattggacattttcattctttgctcatttaaaaacaaatctctgacttgatttatcagaacttctctctatcggctgagtaacttgggatactttatggtctgctaagttgattaaataatcagattagaggatttatgatatgagg

SEQ ID NO: 1084 - protein, 86 aa, Solanum lycopersicum
MAIRMPRIIKKSSTAGDVPKGHFAVYVGEKQKKRFVIPISFLSQPLFQDLLNQAEEEFGFNHPMGGVTIPCSQDVFIDLTSRLSRI

SEQ ID NO: 1085 - DNA, 414 bp, Solanum lycopersicum
catggctattcgtttgctatctataatttctggtgtgaagcaattccacaaattgcaatctgttgttactcgaaatcaaatatcagatgtaccaaaaggacattttgcagtttacgttggagagacagagaagaaaagatacgtagttccaattgaatacttaaatcacatttcgttccaagaattgcttcagaaagcagaggaagaattcgggtttcaacatccaatgggcggtctcacaataccttgcaatgaagatgcattttttcatgtcacttctcgactggagacttgtttatgatctatacactagattagttagagcttataagattttgaattttgttgatcctcttgccacacaagagatgtaaatttaatcatatattattataagtgggaagctctaaagtg

SEQ ID NO: 1086 - protein, 99 aa, Solanum lycopersicum
MAIRLLSIISGVKQFHKLQSVVTRNQISDVPKGHFAVYVGETEKKRYVVPIEYLNHISFQELLQKAEEEFGFQHPMGGLTIPCNEDAFFHVTSRLETCL

SEQ ID NO: 1087 - DNA, 499 bp, Solanum lycopersicum
ggtaaccttacaatccttctttttttctcacctatactaaaactagagatcatggctattcttcgtatgatcaagaagtcttccgcaaccagagatattcccaagggccattttgctgtgtatgttggggagatgcagaaaaagagatttgtgatcccgatatcattcttgagcgaacctttatttcaagacttgcttagtcaatctgaggaagaatttggcttcgaccatccaatgggtggtgtgactattccctgcagcgaagatttgttcatcaatctcacatctatattgcggaagtgagaagggaaccaggccccatttttttaattacacaattatgtgtagttgcaggaagtcaggatagaaactgtgtacagttgagagttcgaagaaacactagttacactaaggacacatttttctacttcaaaagagattgaagtaatgaaactttttacttacatggcttcattctatacatatattgatgtaacaa

SEQ ID NO: 1088 - protein, 85 aa, Solanum lycopersicum
MAIRMPRIIKKSSTAKDVPKGHCAVYVGEEQKKRFVIPISFLSQPLFQDLLSQAEEEFGFNHPMGGLTIPCREDVFINLTSCLRN

SEQ ID NO: 1089 - DNA, 482 bp, Solanum lycopersicum
aagctttctctgctttttggtaaccttacaatccttcttttttttttcacctatactaaaactaagtgatcatggctattcttcgtatgatcaagaagtcttctgcaactaaagatattcccaagggtcattttgctgtgtatgttggggagatgcaaaaaaagagatttgtgatcccgatatcattcttgagcgaacctttatttcaagacttgcttagtcaatctgaggaaaaatttggcttcgaccatccaatgggtggtgtgactattccatgctgtgaggatttgttcatcgatctcacatctcgattgcggaagtgagaaaaaaaccagtccccatttttttaattacacaattttgtatagttgtagtaagccaggatagacactgtacagttcatagttttgaaaaaacactagttagactatggacacatttttctacttcaaaagaaattgaagtaatgaaactttttactt

SEQ ID NO: 1090 - protein, 83 aa, Solanum lycopersicum
MAILRMIKKSSATKDIPKGHFAVYVGEMQKKRFVIPISFLSEPLFQDLLSQSEEKFGFDHPMGGVTIPCCEDLFIDLTSRLRK

SEQ ID NO: 1091 - DNA, 688 bp, Solanum lycopersicum
tttattccgattgtggcaagcacagcacttgatataactgatcagaaaaggtagggcctattgttcttcaactaataccacaattcaatacttggaaggcaagagcatgtgatacttgagtgccattgtcttctgctggtgaccacaaattcctattcgattcacatcaatatgagttgccatttcctatataaacatatccaaagaggtcttccgcaactagagatattcccaagggccattttgctgtgtatgttggagagatgcagaaaaagagatttgtaattccgatatcattcttgagcgaacctttgtttcaagacttgcttagtcaagccgaggatgaatttggctttgaacatccaatgggcggtgttactattccctgcagtgaggatttgttcatggatctcacatctcgattgaggaagtgagaaggaaactagtcaccattttttttcgtcacacaattttgtatagttgtagtaagccaggaactccactgtgtacagttgagagttggaagaaacaatagctagactagtatacatttttctacttcaaaagaaattgaagtaaagaaactttttacttccatacattgatgtaaacaatttattgcagtagaaattggttgctcaactgtaatgggttgggaatcagaaagaactacaatctagtccctctt

SEQ ID NO: 1092 - protein, 83 aa, Solanum lycopersicum
MAILRMIKKSSATRDIPKGHFAVYVGEMQKKRFVIPISFLSQPLFQDLLSQSEEEFGFDHPMGGVTIPCSEDLFIDLTSRLRK

SEQ ID NO: 1093 - DNA, 704 bp, Solanum lycopersicum
gcaatggggccctgtgcttttagacagtttcaaaagtctaaatagtttgacaataggtgggaaggcatattcatgcttggtactcatgtgctatggtctctaaacagttcaagccaaaactcaactacacaagtgatctttaactggtgcctactgaaaatgcccattcaatgaacatcactaggattccacaacttgtcataggcctatataaacacaaaaagaaaagcctctaccaccacaactctcatcaaaacttaaaactatttaaagcttcattatttgcttatctaattgagataaacaaccatggctatccgtatgcctcgtataatcaagaagtcttctacagctaaagatgtaccaaaaggccactgtgctgtgtatgtcggggaggagcagaagaagagatttgtgattcctatatcattcttgagccaacctttatttcaagacttgcttagtcaagctgaggaagaatttggtttcaatcatccaatgggtggtcttacaataccttgcagagaggatgtcttcattaaccttacttcttgtttgaggaactagatttataggatgcagttccaactggctgttgcttaattccggccggtctactcagtctccggctccgacgatccagaaacttgattctatctttttctttgcgggcttcgaccatcaaatcgaacacgctaatcaag

SEQ ID NO: 1094 - protein, 83 aa, Solanum lycopersicum
MAILRMIKKSSATRDIPKGHFAVYVGEMQKKRFVIPISFLSEPLFQDLLSQSEEEFGFDHPMGGVTIPCSEDLFINLTSILRK

SEQ ID NO: 1095 - DNA, 498 bp, Solanum lycopersicum
  misc_feature (449)..(449): n is a, c, g, or t
cttttctccactttcagggtccttagcccttactatcattatttgcttatctatactgaactagaaaaccatggctatccgtatgcctcgtataatcaagaagtcttctactgctggagatgttcctaaaggccactttgctgtttatgttggggaaaagcagaagaagagatttgtgatccctatatcattcttgagccaacctttatttcaagatttacttaaccaagcagaggaagaatttggctttaatcatccgatgggtggtgtcacaattccctgcagccaggatgtgttcattgatctcacttctcgcttgagtaggatctgaggcttttcaccttacacaattttgtaaaaaaactaacctttctagttagcaccatgttactgataattagatagaggggactgactatgtactctcagctgtaaccttacatcctaantttgaatgtaattttcagtagaaaatgaaatttgttcagattcattctt

SEQ ID NO: 1096 - protein, 86 aa, Solanum lycopersicum
MAIRMPRIIKKSSTSGDVPKGHFAVYVGEKQKKRFVIPISFLSQPLYQDLLSQAEEEFGFDHPMGGVTIPCSEDVFIDLTSRLNRI

SEQ ID NO: 1097 - DNA, 516 bp, Stevia rebaudiana
ttctttttagtaacaagactcaaccctcctaaaaaatggccatctttttgccacggatcattcaagcaaaacgagttcttagacgatcattctcaaacggaagcagcacatcgacatctatggacatcccaaaaggctactttgccgtttatgttggagaagaagaaaaacgacgatttgtggttcctgtatcactcttaagtcaaccagcatttcaagaattattacagcttgcagaggaagagtttggatacaaccatccaatgggtggcctcaccattccatgtagcaaagacatatttgctgatcttgcttctcgttttggtgcattatgacatcaatacgtttgtctttgttataacaattttgtaaagcacaactaggacctttcacatgattgtaaatcgagacatgtgtccaagccttatgaaatttaagttaggcgctaatttagctttcttgtgatgtagtataattgttgaaaccaatgagctgaatgaaaacacatttcatttt

SEQ ID NO: 1098 - protein, 99 aa, Stevia rebaudiana
MAIFLPRIIQAKRVLRRSFSNGSSTSTSMDIPKGYFAVYVGEEEKRRFVVPVSLLSQPAFQELLQLAEEEFGYNHPMGGLTIPCSKDIFADLASRFGAL

SEQ ID NO: 1099 - DNA, 500 bp, Solanum tuberosum
  misc_feature (440)..(440): n is a, c, g, or t
caaagattttccttcctttcagaatttttagtaattcttctcttcatcatttgctcatcttaattaaaagatcatggctatccgtgttcctcgtataatcaagaagttttcaacatctttggatgttcccaagggccattttgttgtttatgtcggggagaagcagaagaagagatttgtgataccgatatcatacttgagtcagccttcatttcaagacttgctaagtcaagcagaggaagaatttggcttcaatcatccaatgggtggtatcacaattccctgccgagaggacatcttcattgacatcacttctcaatttaggatttaagtatatatttgagatcaattttccttcttagatctcacaattttgtatacaatagtaggagattcattttgtccagttcgttaaatagaggttatatgaagcttaccancacaaagattggtgctttttgactcacaaagactaattcaaagaacacagattcaacatt

SEQ ID NO: 1100 - protein, 83 aa, Solanum tuberosum
MAILRMIKKSSATRDIPKGHFAVYVGEMQKKRFVIPISFLSEPLFQDLLSQAEEEFGFDHPMGGVTIPCSEDLFTDLTSRLRK

SEQ ID NO: 1101 - DNA, 675 bp, Solanum tuberosum
  misc_feature (513)..(513): n is a, c, g, or t
ctctcaaatcatttttttttcttctcttttcaagaaatggctattaggaaatcaaacaagttgtcacaaagggcaatgttgaagcaaattctaaaaagatgttctagtttaggaaagaaaaatggatatcaagacgaacaacaaggtggtcttccaatggacgtaccaaaaggacattttgtagtttacgttggagaaaatcgaacaaggtacattgttccaatttcaattttatcaaggcccgaatttcgggtactacttcaacgggccgaagaagaattcggattcgatcatgacatgggccttacaattccatgtgacgaagattttttcgaatctctgacttcgtcaatgctaaggtaaataaaaaagacgaaaattaatcgagtcagtaagttccaaggatgaagaaagtggagttagttaaatctaggcggagctagctaggttgtctgaagttttaaatttttctaacagaagttcaggaatctactttattgcttctgtcttttnttggtattttaatttttggcttttgggatttcgagtacattgttataaaatatataactaactggaaattatcttggagaggggtatgtgtgtaaaatctcaaaagtttgtaattttcctcataagtggtgtatgataatatttgaaccctatgagagaatt

SEQ ID NO: 1102 - protein, 108 aa, Solanum tuberosum
MAIRKSNKLSQRAMLKQILKRCSSLGKKNGYQDEQQGGLPMDVPKGHFVVYVGENRTRYIVPISILSRPEFRVLLQRAEEEFGFDHDMGLTIPCDEDFFESLTSSMLR

SEQ ID NO: 1103 - DNA, 670 bp, Solanum tuberosum
taataccacaaagttttcaatacttggaaggcaagaacatgtgatacttcagtgccatttcttctgctggtgcccacaaattcctattcaatacaacatcagcatgagttgccatttcctatataaacatatccaaagaggtatctaccaccacaacactcagcaaacatcaaagctttctctgcttttaagttcccttacagtcctttttttctcatctatactaaaactaagagatcatggctattctccgtatgatcaagaagtcttccgcaactagagatattcccaagggccattttgctgtgtatgttggagagatgcagaaaaagagatttgtgatcccgatatcattcttgagcgaacctttgtttcaagacttgcttagtcaagctgaggaagaatttggcttcgaccatccaatgggtggtgtgactattccctgcagtgaggatttgttcaccgatctcacatctcgattgaggaagtgagaaggaaacttgtccccatattttttgttacacaattttgtatagttgtagtaagccaggaactccactgtgtacagttgagagttagaagaaacactaggtagactaagacacatttttctacttcaaaagaaattgaagtaaagaaactttttacttccatacattgatgtaatcaa

SEQ ID NO: 1104 - protein, 96 aa, Solanum tuberosum
MAKLPQVVLLKQILKKCSSLSKKNEVHFPTDVPKGHFAVYVGKNRTRYIVPISFLTNPEFQCLLRCAEEEFGFNHDMGITIPCEEFIFQSLTSILS

SEQ ID NO: 1105 - DNA, 774 bp, Solanum tuberosum
  misc_feature (632)..(632): n is a, c, g, or t
caagccaaaattcaactacacaagtaatctttaactggtgcctactgaaaataccaattcaatgcacttcactaggattccacaactttccattggcctatataaacacataaagagaagcctcaaccactacaactctcagcaagacttgaaacattcaaagctttactctgctttcaaagtccttacaagttctttccttcattatttgcttatccacattgaactaaacaaccatggctatccgtatgcctcgtataatcaagaagtcttctgcagctaaagatgttccgaaaggccactgtgctgtgtatgttggggaggagcagaagaagagatttgtaattcctatatcattcttgagccatcctttatttcaaaacttgcttagtcaagctgaggaagaatttggtttcgatcatccaatgggtggtcttacaataccttgcagagaggatgtcttcattaacgttacttctcgtttgaggaactagatttataggatgaagttccaactggctgttgcttaattccagccggtctactcagtctccggctccgacgatccagaaacttggttctatcctttcttgcggggcttttccgacgatcaaattaaatcaagaaaccgncctttcactccaatcacaaaatttaatcatcatataatttcaagaaaggccatatatatccattataccatatatagttatacatacaaggcagattcatgtaatcaagaaactagaattctggtgatttcaagaaagtagt

SEQ ID NO: 1106 - protein, 85 aa, Solanum tuberosum
MAIRVPRIIKKFSTSLDVPKGHFVVYVGEKQKKRFVIPISYLSQPSFQDLLSQAEEEFGFNHPMGGITIPCREDIFIDITSQFRI

SEQ ID NO: 1107 - DNA, 707 bp, Solanum tuberosum
tttaatttctctcaaatcatttttttttcttctcttttcaagaaatggctattaggaaatcaaacaagttgtcacaaagggcaatgttgaagcaaattctaaaaagatgttctagtttaggaaagaaaaatggatatcaagacgaacaacaaggtggtcttccaatggacgtaccaaaaggacattttgtagtttacgttggagaaaatcgaacaaggtacattgttccaatttcaattttatcaaggcccgaatttcgggtactacttcaacgggccgaagaagaattcggattcgatcatgacatgggccttacaattccatgtgacgaagattttttcgaatctctgacttcgtcaatgctaaggtaaataaaaaagacgaaaattaatcgagtcagtaagttccaaggatgaagaaagtggagttagttaaatctaggcggagctagctaggttgtctgaagttttaaatttttctaacagaagttcaggaatctactttattgcttctgtcttttttttgtattttttttttggcttttgggattttgtgtttattgttataaaatatataactaactggaaattatctggagaggggtatgtttgtaaatctcaaaagtttgtaattttcctcatagtggtgtttgataatatttgtaccctatgagagaattaacaaattattatatatataaagttata

SEQ ID NO: 1108 - protein, 85 aa, Solanum tuberosum
MAIRMPRIIKKSSAAKDVPKGHCAVYVGEEQKKRFVIPISFLSHPLFQNLLSQAEEEFGFDHPMGGLTIPCREDVFINVTSRLRN

SEQ ID NO: 1109 - DNA, 467 bp, Solanum tuberosum
cctaaaactcaaagatcatggctattctccgtatgatcaagaagtcttccgcaactagagatattcccaaaggccattttgctgtgaatgttggggagatgcaaaaaaagagatttgtgatcccaatatcattcttgagcgaacctttatttcaagacttacttaatcaagctgaggatgaattcggcttcgaacatccaatgggcggtgtgactatttcctgcagtgaagatttgttcatcgatctcacatctcgattgaggaaatgagaaggaagctagtccccatttttttggtacacaattttggatagttgtagtaagccagggactccactgtgtaaagttgagagttagaagaaacactaggtagactaagggacacattttctacttcaaagaattgaatatgacttttacttccgtacatgatgtaatcattcatgcatagatttttttgctcaaaaa

SEQ ID NO: 1110 - protein, 83 aa, Solanum tuberosum
MAILRMIKKSSATRDIPKGHFAVNVGEMQKKRFVIPISFLSEPLFQDLLNQAEDEFGFEHPMGGVTISCSEDLFIDLTSRLRK

SEQ ID NO: 1111 - DNA, 477 bp, Solanum tuberosum
cctaaaactcaaagatcatggctattctccgtatgatcaagaagtcttccgcaactagagatattcccaaaggccattttgctgtgaatgttggggagatgcaaaaaaagagatttgtgatcccaatatcattcttgagcgaacctttatttcaagacttacttaatcaagctgaggatgaattcggcttcgaacatccaatgggcggtgtgactattccctgcagtgaagatttgttcatcgatctcacatctcgattgaggaaatgagaaggaagctagtccccatttttttgttacacaattttggatagttgtagtaagccaggaactccactgtgtaaagttgagagttagaagaaacactaggtagactaagggacacatttttctacttcaaaagaaattgaagtaatgactttttacttccgtacattgatgtaatcaattcattgcaatagaatttttttgctcaaaa

SEQ ID NO: 1112 - protein, 83 aa, Solanum tuberosum
MAILRMIKKSSATRDIPKGHFAVNVGEMQKKRFVIPISFLSEPLFQDLLNQAEDEFGFEHPMGGVTIPCSEDLFIDLTSRLRK

SEQ ID NO: 1113 - DNA, 676 bp, Tagetes erecta
aatacaaatctttgatacaaacatacatacatatatgctgctgctgctgctgccatgagcaacataccaacatctttaacaaactcttgtttaaccatctttttacttgctatttcagcttctgatccttggcctttttctattctctcatcctaacccttcatatatcatcttcttcgtatatcatatcatatcttgttgtttaataaacaaaccatttaaaaacatatatgggaagtggagatgttttgagttctgaaggtgatgtgatgaagcaaaaagatcatgtaccgaaaggatacatggctgtaatggttggtgaagaagaaaaagctaggtttgtgatacctgttattcatctgtatcatccacttttcatggacttgcttaaagaagctgaagaagagtatgggtttcatcaccctggtcccatcaacatcccttgtaatgtccaacacttttctcatgttcaaggcttgattcaaaaagatgacttcttttacaatcatcaacatcatcatcaccatcatcatcaccaccatcatcatcaccatcatcatatttggtgcttcaaagcttaatcattcaatcatccatgcatgctacaagacttaatttgttgcaattgttgttgttgttgcttgttggttaatatatatatatctgatttgattgt

SEQ ID NO: 1114 - protein, 110 aa, Tagetes erecta
MVANQDLIKTGNGVGFKPDILDMDIMEEVLMVSSEDAVNMARELAVKEGLMVGISSGANTVAALRLAKRPENKGKLIVTVHASFGERYLSSVLFEKLRKEAEEMQPVSVD

SEQ ID NO: 1115 - DNA, 473 bp, Tagetes erecta
caaccaccatatatatataacaatgggtcttagaaagtcatgcaataaacaaactcaggcactagctctcaagaaaatcatcaaaaggtgctcgagttttggcaaaaacaacgatggtaacaatctcccacacgacgtaccaaagggacattttgtggtatatatcggggaaagacgcactagatatatcgtcccaatatcgtgcttagatcatccgacgtttcaaggtttactacaaagatctgaggaagaatttggatttagtcatgatatgggcattatcattccatgccaagaagttgattttctgtctattttctccatgatttcatgagaaacaaatttattctttaacattttgtaattttcacatttttttcttctagtggtgtttgtgtttgaacaccctggaaaacattgtgttaattttgtacaaaatggaagttcttatctacgtgagataattaatatat

SEQ ID NO: 1116 - protein, 99 aa, Tagetes erecta
MAIFMPRITQAKKVLRRSFSNGSNTSASMDIPKGYFAVYVGEEEKRRFVVPVSLLRQPAFQELLHLAEEQFGFNHPMGGLTIPCSEDIFVDIASSIGAL

SEQ ID NO: 1117 - DNA, 557 bp, Tagetes erecta
aacacaaaggtgcattttgagacgacgggcccagagatctgggacgacaccaatggtaaagttgacatctttataatggggatcggtagcggaggcactgtctctggtgttggacaatatcttaaatcaaagaacccagatgttaagatttatggactagagcctgaagaaagcaacatactaaatggtggcaaaccaggacctcatcaaaacaggaaacggagtcgggtttaaacccgatatattggacatggatataatggaggaggttcttatggtgtctagtgaagacgctgtaaacatggctagagaattagccgtgaaagaagggcttatggttggaatatcatcaggagcaaatactgttgctgcattaagacttgctaaaaggccagaaaacaaaggcaaacttattgtgaccgttcatgcaagttttggagaaaggtatttatcatctgtattgtttgagaaattaaggaaagaggctgaagaaatgcaacctgtatcagttgattgatgaattttttcaagtaaaaataaatgccgtgtttattttt

SEQ ID NO: 1118 - protein, 103 aa, Tagetes erecta
MGLRKSCNKQTQALALKKIIKRCSSFGKNNDGNNLPHDVPKGHFVVYIGERRTRYIVPISCLDHPTFQGLLQRSEEEFGFSHDMGIIIPCQEVDFLSIFSMIS

SEQ ID NO: 1119 - DNA, 556 bp, Tagetes erecta
acttcacaatattgttcttctcattccgcctctttttagtttaaaaaaaactctacctccttaaaaaatggccatctttatgccacggatcactcaagcaaaaaaagttcttagacggtcgttctcaaatggaagcaacacatcagcatctatggacatcccaaaaggctattttgcggtttatgttggtgaagaagagaaaagacgatttgtggttccagtttcactcttaaggcaacccgcgtttcaagaattactacacctggcagaggaacaatttggattcaaccatccaatgggtggcctcaccatcccatgtagtgaagacatatttgttgatattgcttctagtattggtgctttatgatcacgtctatatgttagcctttgctatgccaattttgtaaagcacaaaaattaggacctttcacgtgtttgtaaatagagacaattgtccaagctatgtgaaattcaaaattatgtgctaatttaagtttgttgtattctagttaatgataaaaccaaatatctgaatgaaaagcatacttcttgttct

SEQ ID NO: 1120 - protein, 116 aa, Tagetes erecta
MGSGDVLSSEGDVMKQKDHVPKGYMAVMVGEEEKARFVIPVIHLYHPLFMDLLKEAEEEYGFHHPGPINIPCNVQHFSHVQGLIQKDDFFYNHQHHHHHHHHHHHHHHHHIWCFKA

SEQ ID NO: 1121 - DNA, 456 bp, Thellungiella halophila
gcacgaggcaagaacttaaatctctttcatttgtatgcagacatcttcataagcttcaagaagcaaacttccaaaaacaagtaaaatggctatggtgagaagtctcttcagtgcaaagaggattcttggcggctccttaacaagaacaagcaaagcaccaagagggtttcttgcagtctacgtcggtgagagccagaagaagcagaggcaccttgtgccaatctcattcttgaaccagccttcgtttcaagcccttctcagtaaattcgaagaagagtttgggtttgatcatccgataggaggcttgacgatccttgccctgaagatacttttatcagtataacttctcagcttcaaggatgaagatgatccaacaaaaaagaactaatatatatttattttcttttttaactcaaaccagagatgaaggattattccatgtgaatagatgacttt

SEQ ID NO: 1122 - protein, 85 aa, Thellungiella halophila
MAMVRSLFSAKRILGGSLTRTSKAPRGFLAVYVGESQKKQRHLVPISFLNQPSFQALLSKFEEEFGFDHPIGGLTILALKILLSV

SEQ ID NO: 1123 - DNA, 487 bp, Thellungiella halophila
gcacgaggaagcaatccaataacttccatctgttcatacatctcttcaaaacctttaaaagaattcaaactttcatacaaaagaagtagaaatggctttggcaagaagtctattgggtgcaaggaagattcttggcctctccgtcgcagcagcttctacgagcaagagagcagcctcggcggcacctaaagggtttcttgcggtgtacgtaggagaaagccagaagaagagatatattgtgccgatctcatatttgagccagccttcgtttcaagctcttctcagtaaatccgaggaagagtttgggttcgatcatccgatgggtggcttaacgatcccctgtcccgaagataccttcatcaccgtgacttctcagctgcaatgatgatgagccaacattttgttctttgaattagagttttagacttagtcattgtaaatagatgaatttttactctttcttgttgaaagagttattcgaaaaggt

SEQ ID NO: 1124 - protein, 97 aa, Thellungiella halophila
MALARSLLGARKILGLSVAAASTSKRAASAAPKGFLAVYVGESQKKRYIVPISYLSQPSFQALLSKSEEEFGFDHPMGGLTIPCPEDTFITVTSQLQ

SEQ ID NO: 1125 - DNA, 530 bp, Taraxacum kok-saghyz
ctctctctctctctctccctctctctctaatttctctctctctctcgttatctcttctctctttcgttagaacatgttgggaaagatgggatcagtcaagaaactggccaaaaaggtaaaagttaaagtcgtaaatggcacagaatcatcacaccatgagtacttgcttagggataaagatgaagcatcttgcacaacgccaactgggtttatcgcgctttacataggggacgaaagacgaaggttcgtggttccaacaggctacctttctcatcctctcttcaagatgttgctcgataaggcttccgatgagtttgggttcgagcaaaagcaaggattggttgttccatgcactgtcacggcttttcaggaggtggtaagtgtcgtggaatgttgcaatgggaagtttgatcttagtcatttggttcaggaatttatttagtgtgtaaaaagtggtggtaaaagagagaagttgtgttcatagcaactccctttttaggttttaattaatcccttcatgtacttggcac

SEQ ID NO: 1126 - protein, 122 aa, Taraxacum kok-saghyz
MLGKMGSVKKLAKKVKVKVVNGTESSHHEYLLRDKDEASCTTPTGFIALYIGDERRRFVVPTGYLSHPLFKMLLDKASDEFGFEQKQGLVVPCTVTAFQEVVSVVECCNGKFDLSHLVQEFI

SEQ ID NO: 1127 - DNA, 512 bp, Taraxacum kok-saghyz
caacatcttttacaaacaaatcctttcaagttagctttctttaagaaaagtaaaccgcaaccttcatacgaaaatggctactcgtatgccccggattattcaggctagaaaagttcttggccgatcgttgtcaaatggaagccactcatcatcatccatagacatcatccccaaaggacattttgcagtttacgttggtgagcaagagaaaagaagatttgttgtccccatatcattattgaaccaacctttattccaagacctgctacgtcaagcagaggaagaatttggttatgatcatccaatgggcggccttacaattccgtgccgtgaggatgtcttcattaatgttgcttgtcgcatgtgctcgttatgaggaagagctatgccttatgtttgctaacaattttgtagatttagagtcaactggagattaactatttgtaaaacaaagggagtaatcttgctccaaattgtatagtaacaaaacttagttcaacatttatatagta

SEQ ID NO: 1128 - protein, 100 aa, Taraxacum kok-saghyz
MATRMPRIIQARKVLGRSLSNGSHSSSSIDIIPKGHFAVYVGEQEKRRFVVPISLLNQPLFQDLLRQAEEEFGYDHPMGGLTIPCREDVFINVACRMCSL

SEQ ID NO: 1129 - DNA, 704 bp, Taraxacum kok-saghyz
aaccctttcaaatttcaaatatgaacaccaaaaccagaggttttagaattagacacaagttggtaaagctcgtcaaatggggacttcaccggagacgaaaagagtccaattacataagactgaaccgccctcctaaaaattacacatccaaagccatgtcaaaactctgtggattcgctcgctctttaaagaaaagcgccaaacacatctgtttacgaaacagaggttccggttacaatcggatcggagaagaaaaggaagtgaacccagttccgaaagggcacttggctgtgtacgttggtgaaaaagaagacgatgcgcatagggttttggtgccggtgatctactttaatcatccgttatttggtgagctgttaagagaggctgaaaaggtttatggctttaatcatgatggtgggattcatgtaccctgccggatctcggagttccagaacgtacaaaccaagattaacgccgccggtgattgtggtggttccgatagattccgtgcacgaccgagatggcggcttactttatgattggtggtgtgaatgtgtttaggactccattgcgatagtgatttgttggtttgctagattccactgttttctaatcttttttagattttatttttggccacttgtaaatgtattctgaattttgcctttaatattatagaatagtacacaccaagtgttattgtt

SEQ ID NO: 1130 - protein, 172 aa, Taraxacum kok-saghyz
MNTKTRGFRIRHKLVKLVKWGLHRRRKESNYIRLNRPPKNYTSKAMSKLCGFARSLKKSAKHICLRNRGSGYNRIGEEKEVNPVPKGHLAVYVGEKEDDAHRVLVPVIYFNHPLFGELLREAEKVYGFNHDGGIHVPCRISEFQNVQTKINAAGDCGGSDRFRARPRWRLTL

SEQ ID NO: 1131 - DNA, 699 bp, Taraxacum kok-saghyz
tttcctaatttctaaagaaaactctttcttcgaagttcgatcgtatcaattttcatggccatgaaacagattcgagtgttcagaattcgattgaagcttgtcaaggctatcaagtgggtagttcatgaaagaattacgcattccagatataataaactgaaactgacaaggtgtacggataaagcgattgaaaggctctgcaaattaggccggagtttgaagagtggtctgaaggggatttgggtctcgaaatccggttcggattatgctcgaatcgccggtgatgaaaaaccagtgccgaaagggcatttggcggtgtactttggggaagaagaggacgatgcgcggagagttttggtgccggtgatttactttaatcacccgttttttggcgatctgttgagagaaactgagaaggtttatgggtttgatcaccgcggaggaatccatgtgccttgccggatgtcggaattcgagaatgtacaaacgaggatttttgcggcgggtggttgtggtggaaggagcggcggacatggtcgttcatggcggagctggttgtaactgattggctggctatattctttttgccactatttttttacggcattcttaaatcattttgagcttatttaaaaaagcttaaaaatatatcaaattgttttagggataatgtttggtttttgttttttggatcatgtt

SEQ ID NO: 1132 - protein, 168 aa, Taraxacum kok-saghyz
MAMKQIRVFRIRLKLVKAIKWVVHERITHSRYNKLKLTRCTDKAIERLCKLGRSLKSGLKGIWVSKSGSDYARIAGDEKPVPKGHLAVYFGEEEDDARRVLVPVIYFNHPFFGDLLRETEKVYGFDHRGGIHVPCRMSEFENVQTRIFAAGGCGGRSGGHGRSWRSWL

SEQ ID NO: 1133 - DNA, 686 bp, Taraxacum kok-saghyz
tctaacctttttcactcactttcaactttaatcccttttaatctcatctaaattcatcaacaaacaacattatcgattcccgtttcctaatttctaaagaaaactctttcttcgaagttcgatcgtatcaattttcatggccatgaaacagattcgagtgttcagaattcgattgaagcttgttaaggctatcaagtgggcaattcatgaaagaaaaacacattccagatatagtaagttaaaactgacaaggtgtacggataaagcgattgaacggctctgcaaattaggccggagtttgaagagaggtctgacggagctctgggtttcgaaatccggttcggattatgctcgaatcgccggtgatgaaaaaccggtgccgaaagggcatttggcggtgtactttggggaagaagaggacgatgcgcggagagttttggtgccggtgatttactttaatcacccgttttttggcgatctgttgagagaaactgagaaggtttatgggtttgatcaccgcggcggaatccatgtgccttgccggatgtcggaattcgagaatgtacaaacgaggatttttgcggcgcgtggttgtggtggaaggagcggcggccatggtcgttcatggcggagctggttgtaactgattggctggctatattctttttgccactattttttacggc

SEQ ID NO: 1134 - protein, 168 aa, Taraxacum kok-saghyz
MAMKQIRVFRIRLKLVKAIKWAIHERKTHSRYSKLKLTRCTDKAIERLCKLGRSLKRGLTELWVSKSGSDYARIAGDEKPVPKGHLAVYFGEEEDDARRVLVPVIYFNHPFFGDLLRETEKVYGFDHRGGIHVPCRMSEFENVQTRIFAARGCGGRSGGHGRSWRSWL

SEQ ID NO: 1135 - DNA, 522 bp, Vitis vinifera
tagaatccatttttcatcatcactttcgttctaagaactaagtttgaaactcatggccatccgttttcagaggattattcctgccaagcagatcctgagacgcatccttccatctccagagtccacaagtgtgcccaaaggctatgttcctgtctatgttggagaaactcagaagaagagatttgtgattccaatttcatacttgaagcacccttcattccaaagcttgctaagtcaggctgaagaagaattcgggtttgatcatccattgggtggtctcacaatcccatgcagggaagaagccttcatcaatctaacttgcagcttgaattgctcatgagcaagaaggaaaatctggacagtaccagcctgaaggatataccaaatctctaacaccattgaccacaaaaaccaatgccagcaatttttggattacgagaattgtgtttttttgtagtgaaaacaaagtaaatttcttttatttttctgtaaagaaaattgacagccttatctcttcgtctc

SEQ ID NO: 1136 - protein, 95 aa, Vitis vinifera
MAIRFQRIIPAKQILRRILPSPESTSVPKGYVPVYVGETQKKRFVIPISYLKHPSFQSLLSQAEEEFGFDHPLGGLTIPCREEAFINLTCSLNCS

SEQ ID NO: 1137 - DNA, 494 bp, Vitis vinifera
gcaaattctttgaaatccatttcccaccatcatttttcgaggaattaagtttgatactcatggccatacgttttcagaggattattcctgcaaagcagatcctgagacgcattctttcttgtccagagtccacaaatgtgcctaaaggccatgttcctatctatgttggagaatatcaaaagaagagatttgtgattccaatttcatacttgaagcatccttcattccagaacttgctaagtcaagctgaggaagagttcgggtttgatcatccacttggtgctctcacaatcccatgcagagaagaagccttcattgatctaactttcagtttgaattgctcatgagcaactgggaaaatctctagacaaccagtctgaaggactctgaatctctaactcctctgaccacaaagaaattttttatcattgagagataggacttttggtactgagaacaatgtaaagttcttgtatttttctataaagcaattt

SEQ ID NO: 1138 - protein, 95 aa, Vitis vinifera
MAIRFQRIIPAKQILRRILSCPESTNVPKGHVPIYVGEYQKKRFVIPISYLKHPSFQNLLSQAEEEFGFDHPLGALTIPCREEAFIDLTFSLNCS

SEQ ID NO: 1139 - DNA, 539 bp, Vitis vinifera
gccatttttcgccataactttagtttgaagaaccaagtttgaaaatcatggccatccgatttcagaggattatccctgccaagcagatcctgaggcgcattcttccttctccagagtccacaaatgtgcccaaaggccatgttcctgtctatgttggagaaactgcgaagaagagatttgtgattccaatttcatacttgaagcatccttcattccagaacttgcttagtcaagctgaggaagagttcgggtttgatcatccacttggtgctcttacaatcccatgcagagaagaagccttcattgatctagctttcagtttgaattgctcatgagcaataggcaaaatctaaagacaaccagcctgaaggacttcgaatctctaacaacactgactccaaaaactaatcccagaaattttgcaccattgagaaataggtctttttgtactgagaacaatgtacatttcttgtagttttctgtaaagcaagtggacggtcaaatgtcttcatattaattgaatagctttacttttcctc

SEQ ID NO: 1140 - protein, 95 aa, Vitis vinifera
MAIRFQRIIPAKQILRRILPSPESTNVPKGHVPVYVGETAKKRFVIPISYLKHPSFQNLLSQAEEEFGFDHPLGALTIPCREEAFIDLAFSLNCS

SEQ ID NO: 1141 - DNA, 584 bp, Vitis vinifera
ccgaactctttgaaatcctttcccaccatctctttttgagaaactaaatttgaaactcatggccatccgttttcagaggattattcctgccaagcagatcctgagacgcattcttccatctccggagtccacaaatgtgccgaaaggccatgttcctgtctatgttggagaaactcagaagaagagatttgtgattccaatttcatacttgaagcatccttcattccaaaacttgctaagtcaggctgaggaagagtttgggtttgatcatccactgggtggcctcactatcccatgcagagaagaagccttcattgatctaacttgcagtttgaactgctcataaggaggaaaatctcaaaatggccggcctcaagcactctcatctctaacaccactgaccccaaaatccagtcccatcaattttgtatcactgagaaataggtctttttgaagtgtcatcaatgtacatttcttcaatatttctgtaaagcaattagttgacattcaaaaatcttcatcttaatcgctgagaaagaacttttctcccttgtgattccttacaagccaaaaaaatgggattc

SEQ ID NO: 1142 - protein, 95 aa, Vitis vinifera
MAIRFQRIIPAKQILRRILPSPESTNVPKGHVPVYVGETQKKRFVIPISYLKHPSFQNLLSQAEEEFGFDHPLGGLTIPCREEAFIDLTCSLNCS

SEQ ID NO: 1143 - DNA, 726 bp, Vitis vinifera
ctttctgtttagtctctctcaacatctgcttccttccttcacaccacaaactctctcaaccccaaatggccatcagaaaatcaaacaaactgcctcaaactgcagttcttaagcaaatcctcaagagatgctccagcctaggaaagaaaaatggctacgatgaagatggccttcctctcgacgtcccaaagggtcactttgccgtttatgttggagaaaacagaagtagatacattgtcccaatctcattcttgtctcatccagagttccaatgcctgcttcaacgcgctgaagaagagttcggcttcgatcatgacatgggcctcacaattccatgcgaagaagttgttttccgctctctaacatcgatgctcagatgagaagagagggtgttattatgatggggtttgctagaacaccatcgaaagcaaaaaagaggataaaaagaacaagaatcacacaactaaactaaaaagacaagagtggatactgcagtccaagaaaagaagagccacgagaagaaaatcgctcgcatatatgatagagacatataaatcaacataaaagtgttataaaacataaatataaaaaaaaactagaaaaaaaacaataataatatggggcgggatgaagggtgaaatagtaatggaagagagagagaaataatgacgatgtggagcaaaaactataaaaaaataaaattgaccgaacgctcaacgaacataa

SEQ ID NO: 1144 - protein, 104 aa, Vitis vinifera
MAIRKSNKLPQTAVLKQILKRCSSLGKKNGYDEDGLPLDVPKGHFAVYVGENRSRYIVPISFLSHPEFQCLLQRAEEEFGFDHDMGLTIPCEEVVFRSLTSMLR

SEQ ID NO: 1145 - DNA, 1127 bp, Vitis vinifera
tcctaattcagatcctctactcaaagcccatcctttatctccttcctcttgactgataaacatgggtattcgtttgccctcagtgattgctaatgtgaagcaaatccttaaactgcagagggatgttccaagaggacatctagctgtttatgtgggagatatcgagacaaggaagcgatttgttgtcccggtatcttacttgaatcatccttcattccaagacttgttgaggcaggcagaggaagagtttggatttgatcatccaatgggaggtcttacatttccttgcaaagaagacacttttgttgatctcactactcaattgggtacctcataacagatgaaagagagagatcccctgcaattttgatgggttttcttttttgcccttttcccattttcttttgtagagcataggaatcatggcagacccatgtatacattctttctccatgtaaatggctagtgattcagatgatacttgattctccttcagaaatctattctcttgcttttttttttgtgcatattcgtacattaaacacaacgaactttagggagtgtggactgccttttgcctctcctctttagttttcttggccctcatatgaaccttagtcgaacttaaccaggagtactgctgcataatctccgaatttcttgttcttaattactggattttcgggcattaggagtgaacccaagtccatttgtcaagtgtgatttgatcctttgttgttaatcaaataggattattgatttgatgatctttaaggcacaagacactggtaagcgacaaggcacctaaaaaaagttctaaatttatgattcttaccaattctagtagtcaagattaaaaccctatgatcttacactgtcaaacttccaaaatttgctcaattccatattttgctatggagctcatactttggtcctcctatagtttttttgctgcgacatagactacaaaatcttgctgttgtattgaaagtcaggggctccatgctgaggttcactttagaagattatattatatagtttttttgttgattcaatgcacatcaaaatatcagccataagccttgtggtatgtttggttcctggaaaatttgaagaaaaatgtaagg

SEQ ID NO: 1146 - protein, 91 aa, Vitis vinifera
MGIRLPSVIANVKQILKLQRDVPRGHLAVYVGDIETRKRFVVPVSYLNHPSFQDLLRQAEEEFGFDHPMGGLTFPCKEDTFVDLTTQLGTS

SEQ ID NO: 1147 - DNA, 546 bp, Vitis vinifera
ggggaaatccatttcccactatcaattttctgagtaactaaatttgaaactcatggccatccgttttcagaggattatccctgcaaagcagatcctgaggcgcattcttccatctccagagtctacaaatgtgcctaaaggccatgttcctgtctatgttggagaagctcaaaagaagagatttgtgattccaatttcatacttgaagcatccttcattccagaacttgctaagtcaggctgaggaagagttcgggtttgatcatccactgggtggtctcacaatcccatgcagagaagaagccttcattgatctaacttgcagtttgaattgctcataagcaaggaggataatctcaaaaccactagcctgaaggactctgaatctctaacaccactgaccccaaaaaccagtcccatcaattttgcttcattgagaaataggccttttttgaaatgagaacaatgtaaatttcttgtacttttctgtaaagcaagtttacagtcaaatgtcttcatattaattgaatagctctactttttccgc

SEQ ID NO: 1148 - protein, 95 aa, Vitis vinifera
MAIRFQRIIPAKQILRRILPSPESTNVPKGHVPVYVGEAQKKRFVIPISYLKHPSFQNLLSQAEEEFGFDHPLGGLTIPCREEAFIDLTCSLNCS

SEQ ID NO: 1149 - DNA, 593 bp, Vitis vinifera
ctcttaccaaagctttctttttctccttaaacctttcaggattcctcctctgaagattttcttctaaagatgggacggatgatgggaataactcatgccaagcaaaagctccagcgaactctctcatcaagaatcaccggagcgatttcagccactgcaaatgttcccaaaggccactttgcagtgtacgttggagaatcgcagaagaagcggtttgtgatccccatatcttacttgaaccatcctctattccaagacttgttacatcgagccgaggaggaattcggattcgaccatccaatgggtggactaacaattccatgcagtgaagactacttcatcagcctcacttcccatttgagttgttcatagatggtggcggcagccttgtaacctggctctgcttcatgcctttaggccatttcttacctttctcccaagtctgaaaacagcagaaactgagacaatcaatccagtctcagcaattttgtaatgtgggggggtttttcctaaatccttcctattcggatgcttctttgctggaatctgtaaatgaattgtccatcaataaattttttctaatctcaaaaaaa

SEQ ID NO: 1150 - protein, 100 aa, Vitis vinifera
MGRMMGITHAKQKLQRTLSSRITGAISATANVPKGHFAVYVGESQKKRFVIPISYLNHPLFQDLLHRAEEEFGFDHPMGGLTIPCSEDYFISLTSHLSCS

SEQ ID NO: 1151 - DNA, 6 bp, Artificial sequence
  auxin response box
tgtctc

SEQ ID NO: 1152 - DNA, 8 bp, Artificial sequence
  auxin response box
ggtcccat

SEQ ID NO: 1153 - DNA, 6 bp, Artificial sequence
  DST element
atagat

SEQ ID NO: 1154 - DNA, 3 bp, Artificial sequence
  DST element
gta

SEQ ID NO: 1155 - protein, 50 aa, Artificial sequence
  motif 23
LAVYVGEMMQKRRFVVPVTYLSHPCFQKLLRKAEEEFGFDHPMGGLTIPC

SEQ ID NO: 1156 - protein, 50 aa, Artificial sequence
  motif 24
  misc_feature (3)..(4): Xaa can be any naturally occurring amino acid
  misc_feature (12)..(13): Xaa can be any naturally occurring amino acid
  misc_feature (15)..(17): Xaa can be any naturally occurring amino acid
  misc_feature (19)..(27): Xaa can be any naturally occurring amino acid
  misc_feature (29)..(32): Xaa can be any naturally occurring amino acid
  misc_feature (34)..(36): Xaa can be any naturally occurring amino acid
  misc_feature (38)..(41): Xaa can be any naturally occurring amino acid
  misc_feature (46)..(46): Xaa can be any naturally occurring amino acid
  misc_feature (48)..(49): Xaa can be any naturally occurring amino acid
KHXXGVYTAEKXXYXXXIXXXXXXXXXAXXXXSXXXYXXXXPMPIXLXXC

SEQ ID NO: 1157 - protein, 21 aa, Artificial sequence
  motif 25
LQSSKQLLKSLSHSSNNVAIP

SEQ ID NO: 1158 - protein, 11 aa, Artificial sequence
  motif 26
  misc_feature (2)..(4): Xaa can be any naturally occurring amino acid
  misc_feature (8)..(8): Xaa can be any naturally occurring amino acid
VXXXKIAXKSQ

SEQ ID NO: 1159 - protein, 11 aa, Artificial sequence
  motif 27
EQIFIDLASRL

SEQ ID NO: 1160 - protein, 11 aa, Artificial sequence
  motif 28
  misc_feature (3)..(5): Xaa can be any naturally occurring amino acid
  misc_feature (7)..(10): Xaa can be any naturally occurring amino acid
VEXXXVXXXXL

SEQ ID NO: 1161 - DNA, 56 bp, Artificial sequence
  primer: prm09059
ggggacaagtttgtacaaaaaagcaggcttaaacaatggctatcagaatttctcga

SEQ ID NO: 1162 - DNA, 50 bp, Artificial sequence
  primer: prm09060
ggggaccactttgtacaagaaagctgggtcagtgtgaatcacgatgaagt

SEQ ID NO: 1163 - DNA, 1179 bp, Oryza sativa
ttgcagttgtgaccaagtaagctgagcatgcccttaacttcacctagaaaaaagtatacttggcttaactgctagtaagacatttcagaactgagactggtgtacgcatttcatgcaagccattaccactttacctgacattttggacagagattagaaatagtttcgtactacctgcaagttgcaacttgaaaagtgaaatttgttccttgctaatatattggcgtgtaattcttttatgcgttagcgtaaaaagttgaaatttgggtcaagttactggtcagattaaccagtaactggttaaagttgaaagatggtcttttagtaatggagggagtactacactatcctcagctgatttaaatcttattccgtcggtggtgatttcgtcaatctcccaacttagtttttcaatatattcataggatagagtgtgcatatgtgtgtttatagggatgagtctacgcgccttatgaacacctacttttgtactgtatttgtcaatgaaaagaaaatcttaccaatgctgcgatgctgacaccaagaagaggcgatgaaaagtgcaacggatatcgtgccacgtcggttgccaagtcagcacagacccaatgggcctttcctacgtgtctcggccacagccagtcgtttaccgcacgttcacatgggcacgaactcgcgtcatcttcccacgcaaaacgacagatctgccctatctggtcccacccatcagtggcccacacctcccatgctgcattatttgcgactcccatcccgtcctccacgcccaaacaccgcacacgggtcgcgatagccacgacccaatcacacaacgccacgtcaccatatgttacgggcagccatgcgcagaagatcccgcgacgtcgctgtcccccgtgtcggttacgaaaaaatatcccaccacgtgtcgctttcacaggacaatatctcgaaggaaaaaaatcgtagcggaaaatccgaggcacgagctgcgattggctgggaggcgtccagcgtggtggggggcccacccccttatccttagcccgtggcgctcctcgctcctcgggtccgtgtataaataccctccggaactcactcttgctggtcaccaacacgaagtaaaaggacaccagaaacatagtacacttgagctcactccaaactcaaacactcacacca

SEQ ID NO: 1164 - DNA, 700 bp, Arabidopsis thaliana; identical to SEQ ID NO: 501

SEQ ID NO: 1165 - protein, 98 aa, Arabidopsis thaliana; identical to SEQ ID NO: 502

SEQ ID NO: 1166 - DNA, 465 bp, Arabidopsis thaliana; identical to SEQ ID NO: 503

SEQ ID NO: 1167 - protein, 154 aa, Arabidopsis thaliana; identical to SEQ ID NO: 504

SEQ ID NO: 1168 - DNA, 327 bp, Arabidopsis thaliana; identical to SEQ ID NO: 505

SEQ ID NO: 1169 - protein, 108 aa, Arabidopsis thaliana; identical to SEQ ID NO: 506

SEQ ID NO: 1170 - DNA, 426 bp, Arabidopsis thaliana; identical to SEQ ID NO: 507

SEQ ID NO: 1171 - protein, 141 aa, Arabidopsis thaliana; identical to SEQ ID NO: 508

SEQ ID NO: 1172 - DNA, 426 bp, Arabidopsis thaliana; identical to SEQ ID NO: 509

SEQ ID NO: 1173 - protein, 141 aa, Arabidopsis thaliana; identical to SEQ ID NO: 510

SEQ ID NO: 1174 - DNA, 426 bp, Arabidopsis thaliana; identical to SEQ ID NO: 511

SEQ ID NO: 1175 - protein, 141 aa, Arabidopsis thaliana; identical to SEQ ID NO: 512

SEQ ID NO: 1176 - DNA, 447 bp, Arabidopsis thaliana; identical to SEQ ID NO: 513

SEQ ID NO: 1177 - protein, 148 aa, Arabidopsis thaliana; identical to SEQ ID NO: 514

SEQ ID NO: 1178 - DNA, 309 bp, Arabidopsis thaliana; identical to SEQ ID NO: 515

SEQ ID NO: 1179 - protein, 102 aa, Arabidopsis thaliana; identical to SEQ ID NO: 516

SEQ ID NO: 1180 - DNA, 408 bp, Arabidopsis thaliana; identical to SEQ ID NO: 517

SEQ ID NO: 1181 - protein, 135 aa, Arabidopsis thaliana; identical to SEQ ID NO: 518

SEQ ID NO: 1182 - DNA, 432 bp, Arabidopsis thaliana; identical to SEQ ID NO: 519

SEQ ID NO: 1183 - protein, 143 aa, Arabidopsis thaliana; identical to SEQ ID NO: 520

SEQ ID NO: 1184 - DNA, 426 bp, Arabidopsis thaliana; identical to SEQ ID NO: 521

SEQ ID NO: 1185 - protein, 141 aa, Arabidopsis thaliana; identical to SEQ ID NO: 522

SEQ ID NO: 1186 - DNA, 315 bp, Arabidopsis thaliana; identical to SEQ ID NO: 523

SEQ ID NO: 1187 - protein, 104 aa, Arabidopsis thaliana; identical to SEQ ID NO: 524

SEQ ID NO: 1188 - DNA, 444 bp, Arabidopsis thaliana; identical to SEQ ID NO: 525

SEQ ID NO: 1189 - protein, 147 aa, Arabidopsis thaliana; identical to SEQ ID NO: 526

SEQ ID NO: 1190 - DNA, 441 bp, Arabidopsis thaliana; identical to SEQ ID NO: 527

SEQ ID NO: 1191 - protein, 146 aa, Arabidopsis thaliana; identical to SEQ ID NO: 528

SEQ ID NO: 1192 - DNA, 462 bp, Arabidopsis thaliana; identical to SEQ ID NO: 529

SEQ ID NO: 1193 - protein, 153 aa, Arabidopsis thaliana; identical to SEQ ID NO: 530

SEQ ID NO: 1194 - DNA, 327 bp, Arabidopsis thaliana; identical to SEQ ID NO: 531

SEQ ID NO: 1195 - protein, 108 aa, Arabidopsis thaliana; identical to SEQ ID NO: 532

SEQ ID NO: 1196 - DNA, 261 bp, Arabidopsis thaliana; identical to SEQ ID NO: 533

SEQ ID NO: 1197 - protein, 86 aa, Arabidopsis thaliana; identical to SEQ ID NO: 534

SEQ ID NO: 1198 - DNA, 408 bp, Arabidopsis thaliana; identical to SEQ ID NO: 535

SEQ ID NO: 1199 - protein, 135 aa, Arabidopsis thaliana; identical to SEQ ID NO: 536

SEQ ID NO: 1200 - DNA, 489 bp, Arabidopsis thaliana; identical to SEQ ID NO: 537

SEQ ID NO: 1201 - protein, 162 aa, Arabidopsis thaliana; identical to SEQ ID NO: 538

SEQ ID NO: 1202 - DNA, 357 bp, Arabidopsis thaliana; identical to SEQ ID NO: 539

SEQ ID NO: 1203 - protein, 118 aa, Arabidopsis thaliana; identical to SEQ ID NO: 540

SEQ ID NO: 1204 - DNA, 375 bp, Arabidopsis thaliana; identical to SEQ ID NO: 541

SEQ ID NO: 1205 - protein, 124 aa, Arabidopsis thaliana; identical to SEQ ID NO: 542

SEQ ID NO: 1206 - DNA, 339 bp, Arabidopsis thaliana; identical to SEQ ID NO: 543

SEQ ID NO: 1207 - protein, 112 aa, Arabidopsis thaliana; identical to SEQ ID NO: 544

SEQ ID NO: 1208 - DNA, 537 bp, Arabidopsis thaliana; identical to SEQ ID NO: 545

SEQ ID NO: 1209 - protein, 178 aa, Arabidopsis thaliana; identical to SEQ ID NO: 546

SEQ ID NO: 1210 - DNA, 366 bp, Arabidopsis thaliana; identical to SEQ ID NO: 547

SEQ ID NO: 1211 - protein, 121 aa, Arabidopsis thaliana; identical to SEQ ID NO: 548

SEQ ID NO: 1212 - DNA, 282 bp, Arabidopsis thaliana; identical to SEQ ID NO: 549

SEQ ID NO: 1213 - protein, 93 aa, Arabidopsis thaliana; identical to SEQ ID NO: 550

SEQ ID NO: 1214 - DNA, 288 bp, Arabidopsis thaliana; identical to SEQ ID NO: 551

SEQ ID NO: 1215 - protein, 95 aa, Arabidopsis thaliana; identical to SEQ ID NO: 552

SEQ ID NO: 1216 - DNA, 279 bp, Arabidopsis thaliana; identical to SEQ ID NO: 553

SEQ ID NO: 1217 - protein, 92 aa, Arabidopsis thaliana; identical to SEQ ID NO: 554

SEQ ID NO: 1218 - DNA, 291 bp, Arabidopsis thaliana; identical to SEQ ID NO: 555

SEQ ID NO: 1219 - protein, 96 aa, Arabidopsis thaliana; identical to SEQ ID NO: 556

SEQ ID NO: 1220 - DNA, 411 bp, Arabidopsis thaliana; identical to SEQ ID NO: 557

SEQ ID NO: 1221 - protein, 136 aa, Arabidopsis thaliana; identical to SEQ ID NO: 558

SEQ ID NO: 1222 - DNA, 321 bp, Arabidopsis thaliana; identical to SEQ ID NO: 559

SEQ ID NO: 1223 - protein, 106 aa, Arabidopsis thaliana; identical to SEQ ID NO: 560

SEQ ID NO: 1224 - DNA, 483 bp, Arabidopsis thaliana; identical to SEQ ID NO: 561

SEQ ID NO: 1225 - protein, 160 aa, Arabidopsis thaliana; identical to SEQ ID NO: 562

SEQ ID NO: 1226 - DNA, 342 bp, Arabidopsis thaliana; identical to SEQ ID NO: 563

SEQ ID NO: 1227 - protein, 113 aa, Arabidopsis thaliana; identical to SEQ ID NO: 564

SEQ ID NO: 1228 - DNA, 357 bp, Arabidopsis thaliana; identical to SEQ ID NO: 565

SEQ ID NO: 1229 - protein, 118 aa, Arabidopsis thaliana; identical to SEQ ID NO: 566

SEQ ID NO: 1230 - DNA, 399 bp, Arabidopsis thaliana; identical to SEQ ID NO: 567

SEQ ID NO: 1231 - protein, 132 aa, Arabidopsis thaliana; identical to SEQ ID NO: 568

SEQ ID NO: 1232 - DNA, 357 bp, Arabidopsis thaliana; identical to SEQ ID NO: 569

SEQ ID NO: 1233 - protein, 118 aa, Arabidopsis thaliana; identical to SEQ ID NO: 570

SEQ ID NO: 1234 - DNA, 513 bp, Arabidopsis thaliana; identical to SEQ ID NO: 571

SEQ ID NO: 1235 - protein, 170 aa, Arabidopsis thaliana; identical to SEQ ID NO: 572

SEQ ID NO: 1236 - DNA, 330 bp, Arabidopsis thaliana; identical to SEQ ID NO: 573

SEQ ID NO: 1237 - protein, 109 aa, Arabidopsis thaliana; identical to SEQ ID NO: 574

SEQ ID NO: 1238 - DNA, 315 bp, Arabidopsis thaliana; identical to SEQ ID NO: 575

SEQ ID NO: 1239 - protein, 104 aa, Arabidopsis thaliana; identical to SEQ ID NO: 576

SEQ ID NO: 1240 - DNA, 321 bp, Arabidopsis thaliana; identical to SEQ ID NO: 577

SEQ ID NO: 1241 - protein, 106 aa, Arabidopsis thaliana; identical to SEQ ID NO: 578

SEQ ID NO: 1242 - DNA, 327 bp, Arabidopsis thaliana; identical to SEQ ID NO: 579

SEQ ID NO: 1243 - protein, 108 aa, Arabidopsis thaliana; identical to SEQ ID NO: 580

SEQ ID NO: 1244 - DNA, 285 bp, Arabidopsis thaliana; identical to SEQ ID NO: 581

SEQ ID NO: 1245 - protein, 94 aa, Arabidopsis thaliana; identical to SEQ ID NO: 582

SEQ ID NO: 1246 - DNA, 318 bp, Arabidopsis thaliana; identical to SEQ ID NO: 583

SEQ ID NO: 1247 - protein, 105 aa, Arabidopsis thaliana; identical to SEQ ID NO: 584

SEQ ID NO: 1248 - DNA, 279 bp, Arabidopsis thaliana; identical to SEQ ID NO: 585

SEQ ID NO: 1249 - protein, 92 aa, Arabidopsis thaliana; identical to SEQ ID NO: 586

SEQ ID NO: 1250 - DNA, 570 bp, Arabidopsis thaliana; identical to SEQ ID NO: 587

SEQ ID NO: 1251 - protein, 189 aa, Arabidopsis thaliana; identical to SEQ ID NO: 588

SEQ ID NO: 1252 - DNA, 312 bp, Arabidopsis thaliana; identical to SEQ ID NO: 589

SEQ ID NO: 1253 - protein, 103 aa, Arabidopsis thaliana; identical to SEQ ID NO: 590

SEQ ID NO: 1254 - DNA, 369 bp, Arabidopsis thaliana; identical to SEQ ID NO: 591

SEQ ID NO: 1255 - protein, 122 aa, Arabidopsis thaliana; identical to SEQ ID NO: 592

SEQ ID NO: 1256 - DNA, 315 bp, Arabidopsis thaliana; identical to SEQ ID NO: 593

SEQ ID NO: 1257 - protein, 104 aa, Arabidopsis thaliana; identical to SEQ ID NO: 594

SEQ ID NO: 1258 - DNA, 345 bp, Arabidopsis thaliana; identical to SEQ ID NO: 595

SEQ ID NO: 1259 - protein, 114 aa, Arabidopsis thaliana; identical to SEQ ID NO: 596

SEQ ID NO: 1260 - DNA, 273 bp, Arabidopsis thaliana; identical to SEQ ID NO: 597

SEQ ID NO: 1261 - protein, 90 aa, Arabidopsis thaliana; identical to SEQ ID NO: 598

SEQ ID NO: 1262 - DNA, 273 bp, Arabidopsis thaliana; identical to SEQ ID NO: 599

SEQ ID NO: 1263 - protein, 90 aa, Arabidopsis thaliana; identical to SEQ ID NO: 600

SEQ ID NO: 1264 - DNA, 276 bp, Arabidopsis thaliana; identical to SEQ ID NO: 601

SEQ ID NO: 1265 - protein, 91 aa, Arabidopsis thaliana; identical to SEQ ID NO: 602

SEQ ID NO: 1266 - DNA, 267 bp, Arabidopsis thaliana; identical to SEQ ID NO: 603

SEQ ID NO: 1267 - protein, 88 aa, Arabidopsis thaliana; identical to SEQ ID NO: 604

SEQ ID NO: 1268 - DNA, 273 bp, Arabidopsis thaliana; identical to SEQ ID NO: 605

SEQ ID NO: 1269 - protein, 90 aa, Arabidopsis thaliana; identical to SEQ ID NO: 606

SEQ ID NO: 1270 - DNA, 336 bp, Arabidopsis thaliana; identical to SEQ ID NO: 607

SEQ ID NO: 1271 - protein, 111 aa, Arabidopsis thaliana; identical to SEQ ID NO: 608

SEQ ID NO: 1272 - DNA, 552 bp, Arabidopsis thaliana; identical to SEQ ID NO: 609

SEQ ID NO: 1273 - protein, 183 aa, Arabidopsis thaliana; identical to SEQ ID NO: 610

SEQ ID NO: 1274 - DNA, 429 bp, Arabidopsis thaliana; identical to SEQ ID NO: 611

SEQ ID NO: 1275 - protein, 142 aa, Arabidopsis thaliana; identical to SEQ ID NO: 612

SEQ ID NO: 1276 - DNA, 429 bp, Arabidopsis thaliana; identical to SEQ ID NO: 613

SEQ ID NO: 1277 - protein, 142 aa, Arabidopsis thaliana; identical to SEQ ID NO: 614

SEQ ID NO: 1278 - DNA, 573 bp, Arabidopsis thaliana; identical to SEQ ID NO: 615

SEQ ID NO: 1279 - protein, 190 aa, Arabidopsis thaliana; identical to SEQ ID NO: 616

SEQ ID NO: 1280 - DNA, 384 bp, Arabidopsis thaliana; identical to SEQ ID NO: 617

SEQ ID NO: 1281 - protein, 127 aa, Arabidopsis thaliana; identical to SEQ ID NO: 618

SEQ ID NO: 1282 - DNA, 360 bp, Arabidopsis thaliana; identical to SEQ ID NO: 619

SEQ ID NO: 1283 - protein, 119 aa, Arabidopsis thaliana; identical to SEQ ID NO: 620

SEQ ID NO: 1284 - DNA, 372 bp, Arabidopsis thaliana; identical to SEQ ID NO: 621

SEQ ID NO: 1285 - protein, 123 aa, Arabidopsis thaliana; identical to SEQ ID NO: 622

SEQ ID NO: 1286 - DNA, 405 bp, Arabidopsis thaliana; identical to SEQ ID NO: 623

SEQ ID NO: 1287 - protein, 134 aa, Arabidopsis thaliana; identical to SEQ ID NO: 624

SEQ ID NO: 1288 - DNA, 354 bp, Arabidopsis thaliana; identical to SEQ ID NO: 625

SEQ ID NO: 1289 - protein, 117 aa, Arabidopsis thaliana; identical to SEQ ID NO: 626

SEQ ID NO: 1290 - DNA, 333 bp, Arabidopsis thaliana; identical to SEQ ID NO: 627

SEQ ID NO: 1291 - protein, 110 aa, Arabidopsis thaliana; identical to SEQ ID NO: 628

SEQ ID NO: 1292 - DNA, 315 bp, Arabidopsis thaliana; identical to SEQ ID NO: 629

SEQ ID NO: 1293 - protein, 104 aa, Arabidopsis thaliana; identical to SEQ ID NO: 630

SEQ ID NO: 1294 - DNA, 483 bp, Arabidopsis thaliana; identical to SEQ ID NO: 631

SEQ ID NO: 1295 - protein, 160 aa, Arabidopsis thaliana; identical to SEQ ID NO: 632

SEQ ID NO: 1296 - DNA, 474 bp, Arabidopsis thaliana; identical to SEQ ID NO: 633

SEQ ID NO: 1297 - protein, 157 aa, Arabidopsis thaliana; identical to SEQ ID NO: 634

SEQ ID NO: 1298 - DNA, 453 bp, Arabidopsis thaliana; identical to SEQ ID NO: 635

SEQ ID NO: 1299 - protein, 150 aa, Arabidopsis thaliana; identical to SEQ ID NO: 636

SEQ ID NO: 1300 - DNA, 324 bp, Arabidopsis thaliana; identical to SEQ ID NO: 637

SEQ ID NO: 1301 - protein, 107 aa, Arabidopsis thaliana; identical to SEQ ID NO: 638

SEQ ID NO: 1302 - DNA, 300 bp, Arabidopsis thaliana; identical to SEQ ID NO: 639

SEQ ID NO: 1303 - protein, 99 aa, Arabidopsis thaliana; identical to SEQ ID NO: 640

SEQ ID NO: 1304 - DNA, 270 bp, Arabidopsis thaliana; identical to SEQ ID NO: 641

SEQ ID NO: 1305 - protein, 89 aa, Arabidopsis thaliana; identical to SEQ ID NO: 642

SEQ ID NO: 1306 - DNA, 318 bp, Arabidopsis thaliana; identical to SEQ ID NO: 643

SEQ ID NO: 1307 - protein, 105 aa, Arabidopsis thaliana; identical to SEQ ID NO: 644

SEQ ID NO: 1308 - DNA, 300 bp, Arabidopsis thaliana; identical to SEQ ID NO: 645

SEQ ID NO: 1309 - protein, 99 aa, Arabidopsis thaliana; identical to SEQ ID NO: 646

SEQ ID NO: 1310 - DNA, 273 bp, Arabidopsis thaliana; identical to SEQ ID NO: 647

SEQ ID NO: 1311 - protein, 90 aa, Arabidopsis thaliana; identical to SEQ ID NO: 648

SEQ ID NO: 1312 - DNA, 447 bp, Arabidopsis thaliana; identical to SEQ ID NO: 649

SEQ ID NO: 1313 - protein, 148 aa, Arabidopsis thaliana; identical to SEQ ID NO: 650

SEQ ID NO: 1314 - DNA, 375 bp, Arabidopsis thaliana; identical to SEQ ID NO: 651

SEQ ID NO: 1315 - protein, 124 aa, Arabidopsis thaliana; identical to SEQ ID NO: 652

SEQ ID NO: 1316 - DNA, 420 bp, Arabidopsis thaliana; identical to SEQ ID NO: 653

SEQ ID NO: 1317 - protein, 139 aa, Arabidopsis thaliana; identical to SEQ ID NO: 654

SEQ ID NO: 1318 - DNA, 396 bp, Arabidopsis thaliana; identical to SEQ ID NO: 655

SEQ ID NO: 1319 - protein, 131 aa, Arabidopsis thaliana; identical to SEQ ID NO: 656

SEQ ID NO: 1320 - DNA, 396 bp, Arabidopsis thaliana; identical to SEQ ID NO: 657

SEQ ID NO: 1321 - protein, 131 aa, Arabidopsis thaliana; identical to SEQ ID NO: 658

SEQ ID NO: 1322 - DNA, 573 bp, Arabidopsis thaliana; identical to SEQ ID NO: 615

SEQ ID NO: 1323 - protein, 190 aa, Arabidopsis thaliana; identical to SEQ ID NO: 616

SEQ ID NO: 1324 - DNA, 270 bp, Arabidopsis thaliana; identical to SEQ ID NO: 661

SEQ ID NO: 1325 - protein, 89 aa, Arabidopsis thaliana; identical to SEQ ID NO: 662

SEQ ID NO: 1326 - DNA, 1137 bp, Aquilegia formosa; identical to SEQ ID NO: 663

SEQ ID NO: 1327 - protein, 179 aa, Aquilegia formosa; identical to SEQ ID NO: 664

SEQ ID NO: 1328 - DNA, 1214 bp, Aquilegia formosa; identical to SEQ ID NO: 665

SEQ ID NO: 1329 - protein, 96 aa, Aquilegia formosa; identical to SEQ ID NO: 666

SEQ ID NO: 1330 - DNA, 450 bp, Arachis hypogaea; identical to SEQ ID NO: 667
  misc_feature (55)..(55): n is a, c, g, or t
  misc_feature (57)..(57): n is a, c, g, or t
  misc_feature (259)..(260): n is a, c, g, or t
  misc_feature (265)..(266): n is a, c, g, or t
  misc_feature (391)..(391): n is a, c, g, or t

SEQ ID NO: 1331 - protein, 99 aa, Arachis hypogaea; identical to SEQ ID NO: 668

SEQ ID NO: 1332 - DNA, 460 bp, Arachis hypogaea; identical to SEQ ID NO: 669
  misc_feature (28)..(28): n is a, c, g, or t
  misc_feature (83)..(83): n is a, c, g, or t
  misc_feature (94)..(94): n is a, c, g, or t
  misc_feature (135)..(135): n is a, c, g, or t
  misc_feature (143)..(143): n is a, c, g, or t
  misc_feature (147)..(147): n is a, c, g, or t
  misc_feature (216)..(216): n is a, c, g, or t
  misc_feature (424)..(424): n is a, c, g, or t
  misc_feature (434)..(434): n is a, c, g, or t
  misc_feature (436)..(436): n is a, c, g, or t
  misc_feature (438)..(438): n is a, c, g, or t
  misc_feature (441)..(441): n is a, c, g, or t
  misc_feature (454)..(454): n is a, c, g, or t

SEQ ID NO: 1333 - protein, 102 aa, Arachis hypogaea; identical to SEQ ID NO: 670

SEQ ID NO: 1334 - DNA, 671 bp, Antirrhinum majus; identical to SEQ ID NO: 671

SEQ ID NO: 1335 - protein, 90 aa, Antirrhinum majus; identical to SEQ ID NO: 672

SEQ ID NO: 1336 - DNA, 470 bp, Antirrhinum majus; identical to SEQ ID NO: 673

SEQ ID NO: 1337 - protein, 94 aa, Antirrhinum majus; identical to SEQ ID NO: 674

SEQ ID NO: 1338 - DNA, 468 bp, Antirrhinum majus; identical to SEQ ID NO: 675

SEQ ID NO: 1339 - protein, 92 aa, Antirrhinum majus; identical to SEQ ID NO: 676

SEQ ID NO: 1340 - DNA, 468 bp, Antirrhinum majus; identical to SEQ ID NO: 677

SEQ ID NO: 1341 - protein, 90 aa, Antirrhinum majus; identical to SEQ ID NO: 678

SEQ ID NO: 1342 - DNA, 1189 bp, Arachis stenosperma; identical to SEQ ID NO: 679

SEQ ID NO: 1343 - protein, 126 aa, Arachis stenosperma; identical to SEQ ID NO: 680

SEQ ID NO: 1344 - DNA, 872 bp, Arachis stenosperma; identical to SEQ ID NO: 681
  misc_feature (1)..(1): n is a, c, g, or t
  misc_feature (817)..(817): n is a, c, g, or t

SEQ ID NO: 1345 - protein, 87 aa, Arachis stenosperma; identical to SEQ ID NO: 682

SEQ ID NO: 1346 - DNA, 886 bp, Arachis stenosperma; identical to SEQ ID NO: 683

SEQ ID NO: 1347 - protein, 102 aa, Arachis stenosperma; identical to SEQ ID NO: 684

SEQ ID NO: 1348 - DNA, 505 bp, Beta vulgaris; identical to SEQ ID NO: 685

SEQ ID NO: 1349 - protein, 117 aa, Beta vulgaris; identical to SEQ ID NO: 686

SEQ ID NO: 1350 - DNA, 1251 bp, Beta vulgaris; identical to SEQ ID NO: 687

SEQ ID NO: 1351 - protein, 97 aa, Beta vulgaris; identical to SEQ ID NO: 688

SEQ ID NO: 1352 - DNA, 444 bp, Capsicum annuum; identical to SEQ ID NO: 689

SEQ ID NO: 1353 - protein, 83 aa, Capsicum annuum; identical to SEQ ID NO: 690

SEQ ID NO: 1354 - DNA, 412 bp, Capsicum annuum; identical to SEQ ID NO: 691

SEQ ID NO: 1355 - protein, 85 aa, Capsicum annuum; identical to SEQ ID NO: 692

SEQ ID NO: 1356 - DNA, 587 bp, Capsicum annuum; identical to SEQ ID NO: 693

SEQ ID NO: 1357 - protein, 101 aa, Capsicum annuum; identical to SEQ ID NO: 694

SEQ ID NO: 1358 - DNA, 696 bp, Cichorium endivia; identical to SEQ ID NO: 695

SEQ ID NO: 1359 - protein, 101 aa, Cichorium endivia; identical to SEQ ID NO: 696

SEQ ID NO: 1360 - DNA, 963 bp, Cichorium endivia; identical to SEQ ID NO: 697

SEQ ID NO: 1361 - protein, 105 aa, Cichorium endivia; identical to SEQ ID NO: 698

SEQ ID NO: 1362 - DNA, 579 bp, Cichorium endivia; identical to SEQ ID NO: 699

SEQ ID NO: 1363 - protein, 137 aa, Cichorium endivia; identical to SEQ ID NO: 700

SEQ ID NO: 1364 - DNA, 911 bp, Cichorium endivia; identical to SEQ ID NO: 701

SEQ ID NO: 1365 - protein, 163 aa, Cichorium endivia; identical to SEQ ID NO: 702

SEQ ID NO: 1366 - DNA, 699 bp, Cichorium intybus; identical to SEQ ID NO: 703

SEQ ID NO: 1367 - protein, 163 aa, Cichorium intybus; identical to SEQ ID NO: 704

SEQ ID NO: 1368 - DNA, 641 bp, Cichorium intybus; identical to SEQ ID NO: 705
  misc_feature (630)..(630): n is a, c, g, or t

SEQ ID NO: 1369 - protein, 105 aa, Cichorium intybus; identical to SEQ ID NO: 706

SEQ ID NO: 1370 - DNA, 790 bp, Cichorium intybus; identical to SEQ ID NO: 707

SEQ ID NO: 1371 - protein, 109 aa, Cichorium intybus; identical to SEQ ID NO: 708

SEQ ID NO: 1372 - DNA, 830 bp, Cichorium intybus; identical to SEQ ID NO: 709

SEQ ID NO: 1373 - protein, 137 aa, Cichorium intybus; identical to SEQ ID NO: 710

SEQ ID NO: 1374 - DNA, 598 bp, Centaurea maculosa; identical to SEQ ID NO: 711

SEQ ID NO: 1375 - protein, 98 aa, Centaurea maculosa; identical to SEQ ID NO: 712

SEQ ID NO: 1376 - DNA, 491 bp, Centaurea maculosa; identical to SEQ ID NO: 713

SEQ ID NO: 1377 - protein, 98 aa, Centaurea maculosa; identical to SEQ ID NO: 714

SEQ ID NO: 1378 - DNA, 744 bp, Centaurea maculosa; identical to SEQ ID NO: 715

SEQ ID NO: 1379 - protein, 100 aa, Centaurea maculosa; identical to SEQ ID NO: 716

SEQ ID NO: 1380 - DNA, 575 bp, Centaurea maculosa; identical to SEQ ID NO: 717

SEQ ID NO: 1381 - protein, 106 aa, Centaurea maculosa; identical to SEQ ID NO: 718

SEQ ID NO: 1382 - DNA, 1051 bp, Citrus reticulata; identical to SEQ ID NO: 719

SEQ ID NO: 1383 - protein, 109 aa, Citrus reticulata; identical to SEQ ID NO: 720

SEQ ID NO: 1384 - DNA, 787 bp, Carthamus tinctorius; identical to SEQ ID NO: 721

SEQ ID NO: 1385 - protein, 98 aa, Carthamus tinctorius; identical to SEQ ID NO: 722

SEQ ID NO: 1386 - DNA, 845 bp, Carthamus tinctorius; identical to SEQ ID NO: 723

SEQ ID NO: 1387 - protein, 101 aa, Carthamus tinctorius; identical to SEQ ID NO: 724

SEQ ID NO: 1388 - DNA, 729 bp, Carthamus tinctorius; identical to SEQ ID NO: 725

SEQ ID NO: 1389 - protein, 99 aa, Carthamus tinctorius; identical to SEQ ID NO: 726

SEQ ID NO: 1390 - DNA, 505 bp, Carthamus tinctorius; identical to SEQ ID NO: 727

SEQ ID NO: 1391 - protein, 102 aa, Carthamus tinctorius; identical to SEQ ID NO: 728

SEQ ID NO: 1392 - DNA, 553 bp, Carthamus tinctorius; identical to SEQ ID NO: 729

SEQ ID NO: 1393 - protein, 60 aa, Carthamus tinctorius; identical to SEQ ID NO: 730

SEQ ID NO: 1394 - DNA, 642 bp, Carthamus tinctorius; identical to SEQ ID NO: 731

SEQ ID NO: 1395 - protein, 139 aa, Carthamus tinctorius; identical to SEQ ID NO: 732

SEQ ID NO: 1396 - DNA, 673 bp, Fragaria vesca; identical to SEQ ID NO: 733

SEQ ID NO: 1397 - protein, 83 aa, Fragaria vesca; identical to SEQ ID NO: 734

SEQ ID NO: 1398 - DNA, 650 bp, Fragaria vesca; identical to SEQ ID NO: 735

SEQ ID NO: 1399 - protein, 106 aa, Fragaria vesca; identical to SEQ ID NO: 736

SEQ ID NO: 1400 - DNA, 645 bp, Fragaria vesca; identical to SEQ ID NO: 737

SEQ ID NO: 1401 - protein, 132 aa, Fragaria vesca; identical to SEQ ID NO: 738

SEQ ID NO: 1402 - DNA, 717 bp, Fragaria vesca; identical to SEQ ID NO: 739

SEQ ID NO: 1403 - protein, 167 aa, Fragaria vesca; identical to SEQ ID NO: 740

SEQ ID NO: 1404 - DNA, 532 bp, Gossypium hirsutum; identical to SEQ ID NO: 741

SEQ ID NO: 1405 - protein, 96 aa, Gossypium hirsutum; identical to SEQ ID NO: 742

SEQ ID NO: 1406 - DNA, 517 bp, Gossypium hirsutum; identical to SEQ ID NO: 743

SEQ ID NO: 1407 - protein, 79 aa, Gossypium hirsutum; identical to SEQ ID NO: 744

SEQ ID NO: 1408 - DNA, 546 bp, Gossypium hirsutum; identical to SEQ ID NO: 745

SEQ ID NO: 1409 - protein, 81 aa, Gossypium hirsutum; identical to SEQ ID NO: 746

SEQ ID NO: 1410 - DNA, 544 bp, Gossypium hirsutum; identical to SEQ ID NO: 747

SEQ ID NO: 1411 - protein, 97 aa, Gossypium hirsutum; identical to SEQ ID NO: 748

SEQ ID NO: 1412 - DNA, 513 bp, Gossypium hirsutum; identical to SEQ ID NO: 749

SEQ ID NO: 1413 - protein, 88 aa, Gossypium hirsutum; identical to SEQ ID NO: 750

SEQ ID NO: 1414 - DNA, 509 bp, Gossypium hirsutum; identical to SEQ ID NO: 751

SEQ ID NO: 1415 - protein, 96 aa, Gossypium hirsutum; identical to SEQ ID NO: 752

SEQ ID NO: 1416 - DNA, 535 bp, Gossypium hirsutum; identical to SEQ ID NO: 753

SEQ ID NO: 1417 - protein, 94 aa, Gossypium hirsutum; identical to SEQ ID NO: 754

SEQ ID NO: 1418 - DNA, 475 bp, Gerbera hybrid cultivar; identical to SEQ ID NO: 755

SEQ ID NO: 1419 - protein, 99 aa, Gerbera hybrid cultivar; identical to SEQ ID NO: 756

SEQ ID NO: 1420 - DNA, 427 bp, Glycine max; identical to SEQ ID NO: 757

SEQ ID NO: 1421 - protein, 99 aa, Glycine max; identical to SEQ ID NO: 758

SEQ ID NO: 1422 - DNA, 455 bp, Glycine max; identical to SEQ ID NO: 759

SEQ ID NO: 1423 - protein, 92 aa, Glycine max; identical to SEQ ID NO: 760

SEQ ID NO: 1424 - DNA, 514 bp, Glycine max; identical to SEQ ID NO: 761
  misc_feature (406)..(406): n is a, c, g, or t

SEQ ID NO: 1425 - protein, 93 aa, Glycine max; identical to SEQ ID NO: 762

SEQ ID NO: 1426 - DNA, 547 bp, Glycine max; identical to SEQ ID NO: 763

SEQ ID NO: 1427 - protein, 93 aa, Glycine max; identical to SEQ ID NO: 764

SEQ ID NO: 1428 - DNA, 494 bp, Glycine max; identical to SEQ ID NO: 765

SEQ ID NO: 1429 - protein, 82 aa, Glycine max; identical to SEQ ID NO: 766

SEQ ID NO: 1430 - DNA, 511 bp, Glycine max; identical to SEQ ID NO: 767

SEQ ID NO: 1431 - protein, 91 aa, Glycine max; identical to SEQ ID NO: 768

SEQ ID NO: 1432 - DNA, 398 bp, Glycine max; identical to SEQ ID NO: 769

SEQ ID NO: 1433 - protein, 82 aa, Glycine max; identical to SEQ ID NO: 770

SEQ ID NO: 1434 - DNA, 334 bp, Gossypium raimondii; identical to SEQ ID NO: 771

SEQ ID NO: 1435 - protein, 98 aa, Gossypium raimondii; identical to SEQ ID NO: 772

SEQ ID NO: 1436 - DNA, 804 bp, Gossypium raimondii; identical to SEQ ID NO: 773

SEQ ID NO: 1437 - protein, 161 aa, Gossypium raimondii; identical to SEQ ID NO: 774

SEQ ID NO: 1438 - DNA, 518 bp, Helianthus annuus; identical to SEQ ID NO: 775

SEQ ID NO: 1439 - protein, 99 aa, Helianthus annuus; identical to SEQ ID NO: 776

SEQ ID NO: 1440 - DNA, 524 bp, Helianthus annuus; identical to SEQ ID NO: 777

SEQ ID NO: 1441 - protein, 99 aa, Helianthus annuus; identical to SEQ ID NO: 778

SEQ ID NO: 1442 - DNA, 530 bp, Hedyotis centranthoides; identical to SEQ ID NO: 779

SEQ ID NO: 1443 - protein, 100 aa, Hedyotis centranthoides; identical to SEQ ID NO: 780

SEQ ID NO: 1444 - DNA, 533 bp, Helianthus exilis; identical to SEQ ID NO: 781

SEQ ID NO: 1445 - protein, 99 aa, Helianthus exilis; identical to SEQ ID NO: 778

SEQ ID NO: 1446 - DNA, 591 bp, Helianthus exilis; identical to SEQ ID NO: 783

SEQ ID NO: 1447 - protein, 99 aa, Helianthus exilis; identical to SEQ ID NO: 784

SEQ ID NO: 1448 - DNA, 1055 bp, Helianthus exilis; identical to SEQ ID NO: 785

SEQ ID NO: 1449 - protein, 99 aa, Helianthus exilis; identical to SEQ ID NO: 786

SEQ ID NO: 1450 - DNA, 620 bp, Helianthus paradoxus; identical to SEQ ID NO: 787

SEQ ID NO: 1451 - protein, 102 aa, Helianthus paradoxus; identical to SEQ ID NO: 788

SEQ ID NO: 1452 - DNA, 784 bp, Helianthus paradoxus; identical to SEQ ID NO: 789

SEQ ID NO: 1453 - protein, 122 aa, Helianthus paradoxus; identical to SEQ ID NO: 790

SEQ ID NO: 1454 - DNA, 460 bp, Helianthus paradoxus; identical to SEQ ID NO: 791

SEQ ID NO: 1455 - protein, 99 aa, Helianthus paradoxus; identical to SEQ ID NO: 792

SEQ ID NO: 1456 - DNA, 513 bp, Helianthus petiolaris; identical to SEQ ID NO: 793

SEQ ID NO: 1457 - protein, 168 aa, Helianthus petiolaris; identical to SEQ ID NO: 794

SEQ ID NO: 1458 - DNA, 843 bp, Helianthus petiolaris; identical to SEQ ID NO: 795
  misc_feature (46)..(46): n is a, c, g, or t

SEQ ID NO: 1459 - protein, 127 aa, Helianthus petiolaris; identical to SEQ ID NO: 796

SEQ ID NO: 1460 - DNA, 660 bp, Helianthus petiolaris; identical to SEQ ID NO: 797
  misc_feature (656)..(659): n is a, c, g, or t

SEQ ID NO: 1461 - protein, 99 aa, Helianthus petiolaris; identical to SEQ ID NO: 778

SEQ ID NO: 1462 - DNA, 516 bp, Hedyotis terminalis; identical to SEQ ID NO: 799

SEQ ID NO: 1463 - protein, 100 aa, Hedyotis terminalis; identical to SEQ ID NO: 800

SEQ ID NO: 1464 - DNA, 530 bp, Helianthus tuberosus; identical to SEQ ID NO: 801

SEQ ID NO: 1465 - protein, 98 aa, Helianthus tuberosus; identical to SEQ ID NO: 802

SEQ ID NO: 1466 - DNA, 857 bp, Helianthus tuberosus; identical to SEQ ID NO: 803

SEQ ID NO: 1467 - protein, 153 aa, Helianthus tuberosus; identical to SEQ ID NO: 804

SEQ ID NO: 1468 - DNA, 990 bp, Helianthus tuberosus; identical to SEQ ID NO: 805
  misc_feature (875)..(875): n is a, c, g, or t

SEQ ID NO: 1469 - protein, 104 aa, Helianthus tuberosus; identical to SEQ ID NO: 806

SEQ ID NO: 1470 - DNA, 898 bp, Helianthus tuberosus; identical to SEQ ID NO: 807

SEQ ID NO: 1471 - protein, 104 aa, Helianthus tuberosus; identical to SEQ ID NO: 808

SEQ ID NO: 1472 - DNA, 852 bp, Helianthus tuberosus; identical to SEQ ID NO: 809

SEQ ID NO: 1473 - protein, 99 aa, Helianthus tuberosus; identical to SEQ ID NO: 810

SEQ ID NO: 1474 - DNA, 772 bp, Lotus japonicus; identical to SEQ ID NO: 811

SEQ ID NO: 1475 - protein, 89 aa, Lotus japonicus; identical to SEQ ID NO: 812

SEQ ID NO: 1476 - DNA, 496 bp, Lotus japonicus; identical to SEQ ID NO: 813

SEQ ID NO: 1477 - protein, 169 aa, Lotus japonicus; identical to SEQ ID NO: 814

SEQ ID NO: 1478 - DNA, 570 bp, Lactuca perennis; identical to SEQ ID NO: 815

SEQ ID NO: 1479 - protein, 169 aa, Lactuca perennis; identical to SEQ ID NO: 816

SEQ ID NO: 1480 - DNA, 882 bp, Lactuca perennis; identical to SEQ ID NO: 817

SEQ ID NO: 1481 - protein, 98 aa, Lactuca perennis; identical to SEQ ID NO: 818

SEQ ID NO: 1482 - DNA, 581 bp, Lactuca perennis; identical to SEQ ID NO: 819

SEQ ID NO: 1483 - protein, 133 aa, Lactuca perennis; identical to SEQ ID NO: 820

SEQ ID NO: 1484 - DNA, 856 bp, Lactuca perennis; identical to SEQ ID NO: 821

SEQ ID NO: 1485 - protein, 98 aa, Lactuca perennis; identical to SEQ ID NO: 822

SEQ ID NO: 1486 - DNA, 899 bp, Lactuca saligna; identical to SEQ ID NO: 823

SEQ ID NO: 1487 - protein, 103 aa, Lactuca saligna; identical to SEQ ID NO: 824

SEQ ID NO: 1488 - DNA, 387 bp, Lactuca saligna; identical to SEQ ID NO: 825

SEQ ID NO: 1489 - protein, 167 aa, Lactuca saligna; identical to SEQ ID NO: 826

SEQ ID NO: 1490 - DNA, 785 bp, Lactuca saligna; identical to SEQ ID NO: 827

SEQ ID NO: 1491 - protein, 98 aa, Lactuca saligna; identical to SEQ ID NO: 828

SEQ ID NO: 1492 - DNA, 831 bp, Lactuca saligna; identical to SEQ ID NO: 829

SEQ ID NO: 1493 - protein, 140 aa, Lactuca saligna; identical to SEQ ID NO: 830

SEQ ID NO: 1494 - DNA, 600 bp, Lactuca saligna; identical to SEQ ID NO: 831

SEQ ID NO: 1495 - protein, 98 aa, Lactuca saligna; identical to SEQ ID NO: 832

SEQ ID NO: 1496 - DNA, 960 bp, Lactuca sativa; identical to SEQ ID NO: 833

SEQ ID NO: 1497 - protein, 96 aa, Lactuca sativa; identical to SEQ ID NO: 834

SEQ ID NO: 1498 - DNA, 587 bp, Lactuca sativa; identical to SEQ ID NO: 835
  misc_feature (587)..(587): n is a, c, g, or t

SEQ ID NO: 1499 - protein, 167 aa, Lactuca sativa; identical to SEQ ID NO: 836

SEQ ID NO: 1500 - DNA, 754 bp, Lactuca sativa; identical to SEQ ID NO: 837

SEQ ID NO: 1501 - protein, 147 aa, Lactuca sativa; identical to SEQ ID NO: 838

SEQ ID NO: 1502 - DNA, 765 bp, Lactuca sativa; identical to SEQ ID NO: 839

SEQ ID NO: 1503 - protein, 144 aa, Lactuca sativa; identical to SEQ ID NO: 840

SEQ ID NO: 1504 - DNA, 765 bp, Lactuca sativa; identical to SEQ ID NO: 841

SEQ ID NO: 1505 - protein, 140 aa, Lactuca sativa; identical to SEQ ID NO: 842

SEQ ID NO: 1506 - DNA, 537 bp, Lactuca serriola; identical to SEQ ID NO: 843

SEQ ID NO: 1507 - protein, 103 aa, Lactuca serriola; identical to SEQ ID NO: 844

SEQ ID NO: 1508 - DNA, 922 bp, Lactuca serriola; identical to SEQ ID NO: 845

SEQ ID NO: 1509 - protein, 162 aa, Lactuca serriola; identical to SEQ ID NO: 846

SEQ ID NO: 1510 - DNA, 782 bp, Lactuca serriola; identical to SEQ ID NO: 847

SEQ ID NO: 1511 - protein, 167 aa, Lactuca serriola; identical to SEQ ID NO: 848

SEQ ID NO: 1512 - DNA, 581 bp, Lactuca serriola; identical to SEQ ID NO: 849

SEQ ID NO: 1513 - protein, 99 aa, Lactuca serriola; identical to SEQ ID NO: 850

SEQ ID NO: 1514 - DNA, 402 bp, Linum usitatissimum; identical to SEQ ID NO: 851

SEQ ID NO: 1515 - protein, 108 aa, Linum usitatissimum; identical to SEQ ID NO: 852

SEQ ID NO: 1516 - DNA, 575 bp, Lactuca virosa; identical to SEQ ID NO: 853

SEQ ID NO: 1517 - protein, 167 aa, Lactuca virosa; identical to SEQ ID NO: 854

SEQ ID NO: 1518 - DNA, 665 bp, Lactuca virosa; identical to SEQ ID NO: 855

SEQ ID NO: 1519 - protein, 95 aa, Lactuca virosa; identical to SEQ ID NO: 856

SEQ ID NO: 1520 - DNA, 861 bp, Lactuca virosa; identical to SEQ ID NO: 857

SEQ ID NO: 1521 - protein, 180 aa, Lactuca virosa; identical to SEQ ID NO: 858

SEQ ID NO: 1522 - DNA, 774 bp, Lactuca virosa; identical to SEQ ID NO: 859

SEQ ID NO: 1523 - protein, 100 aa, Lactuca virosa; identical to SEQ ID NO: 860

SEQ ID NO: 1524 - DNA, 772 bp, Lactuca virosa; identical to SEQ ID NO: 861
  misc_feature (747)..(747): n is a, c, g, or t

SEQ ID NO: 1525 - protein, 169 aa, Lactuca virosa; identical to SEQ ID NO: 862

SEQ ID NO: 1526 - DNA, 601 bp, Malus x domestica; identical to SEQ ID NO: 863

SEQ ID NO: 1527 - protein, 101 aa, Malus x domestica; identical to SEQ ID NO: 864

SEQ ID NO: 1528 - DNA, 465 bp, Malus x domestica; identical to SEQ ID NO: 865

SEQ ID NO: 1529 - protein, 101 aa, Malus x domestica; identical to SEQ ID NO: 866

SEQ ID NO: 1530 - DNA, 569 bp, Malus x domestica; identical to SEQ ID NO: 867

SEQ ID NO: 1531 - protein, 91 aa, Malus x domestica; identical to SEQ ID NO: 868

SEQ ID NO: 1532 - DNA, 602 bp, Malus x domestica; identical to SEQ ID NO: 869

SEQ ID NO: 1533 - protein, 100 aa, Malus x domestica; identical to SEQ ID NO: 870

SEQ ID NO: 1534 - DNA, 459 bp, Malus x domestica; identical to SEQ ID NO: 871

SEQ ID NO: 1535 - protein, 100 aa, Malus x domestica; identical to SEQ ID NO: 872

SEQ ID NO: 1536 - DNA, 664 bp, Malus x domestica; identical to SEQ ID NO: 873

SEQ ID NO: 1537 - protein, 99 aa, Malus x domestica; identical to SEQ ID NO: 874

SEQ ID NO: 1538 - DNA, 598 bp, Malus x domestica; identical to SEQ ID NO: 875

SEQ ID NO: 1539 - protein, 101 aa, Malus x domestica; identical to SEQ ID NO: 876

SEQ ID NO: 1540 - DNA, 583 bp, Malus x domestica; identical to SEQ ID NO: 877

SEQ ID NO: 1541 - protein, 101 aa, Malus x domestica; identical to SEQ ID NO: 878

SEQ ID NO: 1542 - DNA, 485 bp, Medicago sativa; identical to SEQ ID NO: 879

SEQ ID NO: 1543 - protein, 86 aa, Medicago sativa; identical to SEQ ID NO: 880

SEQ ID NO: 1544 - DNA, 613 bp, Medicago sativa; identical to SEQ ID NO: 881

SEQ ID NO: 1545 - protein, 92 aa, Medicago sativa; identical to SEQ ID NO: 882

SEQ ID NO: 1546 - DNA, 541 bp, Medicago sativa; identical to SEQ ID NO: 883

SEQ ID NO: 1547 - protein, 92 aa, Medicago sativa; identical to SEQ ID NO: 884

SEQ ID NO: 1548 - DNA, 510 bp, Medicago sativa; identical to SEQ ID NO: 885

SEQ ID NO: 1549 - protein, 87 aa, Medicago sativa; identical to SEQ ID NO: 886

SEQ ID NO: 1550 - DNA, 571 bp, Medicago sativa; identical to SEQ ID NO: 887

SEQ ID NO: 1551 - protein, 92 aa, Medicago sativa; identical to SEQ ID NO: 888

SEQ ID NO: 1552 - DNA, 450 bp, Medicago truncatula; identical to SEQ ID NO: 889

SEQ ID NO: 1553 - protein, 94 aa, Medicago truncatula; identical to SEQ ID NO: 890

SEQ ID NO: 1554 - DNA, 508 bp, Medicago truncatula; identical to SEQ ID NO: 891
  misc_feature (477)..(477): n is a, c, g, or t

SEQ ID NO: 1555 - protein, 90 aa, Medicago truncatula; identical to SEQ ID NO: 892

SEQ ID NO: 1556 - DNA, 724 bp, Medicago truncatula; identical to SEQ ID NO: 893

SEQ ID NO: 1557 - protein, 85 aa, Medicago truncatula; identical to SEQ ID NO: 894

SEQ ID NO: 1558 - DNA, 475 bp, Medicago truncatula; identical to SEQ ID NO: 895

SEQ ID NO: 1559 - protein, 85 aa, Medicago truncatula; identical to SEQ ID NO: 896

SEQ ID NO: 1560 - DNA, 368 bp, Medicago truncatula; identical to SEQ ID NO: 897

SEQ ID NO: 1561 - protein, 95 aa, Medicago truncatula; identical to SEQ ID NO: 898

SEQ ID NO: 1562 - DNA, 455 bp, Medicago truncatula; identical to SEQ ID NO: 899

SEQ ID NO: 1563 - protein, 92 aa, Medicago truncatula; identical to SEQ ID NO: 900

SEQ ID NO: 1564 - DNA, 519 bp, Nicotiana benthamiana; identical to SEQ ID NO: 901

SEQ ID NO: 1565 - protein, 115 aa, Nicotiana benthamiana; identical to SEQ ID NO: 902

SEQ ID NO: 1566 - DNA, 466 bp, Nicotiana benthamiana; identical to SEQ ID NO: 903

SEQ ID NO: 1567 - protein, 85 aa, Nicotiana benthamiana; identical to SEQ ID NO: 904

SEQ ID NO: 1568 - DNA, 516 bp, Nicotiana benthamiana; identical to SEQ ID NO: 905

SEQ ID NO: 1569 - protein, 96 aa, Nicotiana benthamiana; identical to SEQ ID NO: 906

SEQ ID NO: 1570 - DNA, 553 bp, Nicotiana tabacum; identical to SEQ ID NO: 907

SEQ ID NO: 1571 - protein, 105 aa, Nicotiana tabacum; identical to SEQ ID NO: 908

SEQ ID NO: 1572 - DNA, 514 bp, Nicotiana tabacum; identical to SEQ ID NO: 909

SEQ ID NO: 1573 - protein, 99 aa, Nicotiana tabacum; identical to SEQ ID NO: 910

SEQ ID NO: 1574 - DNA, 422 bp, Nicotiana tabacum; identical to SEQ ID NO: 911

SEQ ID NO: 1575 - protein, 108 aa, Nicotiana tabacum; identical to SEQ ID NO: 912

SEQ ID NO: 1576 - DNA, 615 bp, Nicotiana tabacum; identical to SEQ ID NO: 913

SEQ ID NO: 1577 - protein, 82 aa, Nicotiana tabacum; identical to SEQ ID NO: 914

SEQ ID NO: 1578 - DNA, 813 bp, Nicotiana tabacum; identical to SEQ ID NO: 915

SEQ ID NO: 1579 - protein, 85 aa, Nicotiana tabacum; identical to SEQ ID NO: 916

SEQ ID NO: 1580 - DNA, 608 bp, Nicotiana tabacum; identical to SEQ ID NO: 917
  misc_feature (459)..(459): n is a, c, g, or t
  misc_feature (479)..(479): n is a, c, g, or t

SEQ ID NO: 1581 - protein, 86 aa, Nicotiana tabacum; identical to SEQ ID NO: 918

SEQ ID NO: 1582 - DNA, 276 bp, Oryza sativa; identical to SEQ ID NO: 919

SEQ ID NO: 1583 - protein, 91 aa, Oryza sativa; identical to SEQ ID NO: 920

SEQ ID NO: 1584 - DNA, 501 bp, Oryza sativa; identical to SEQ ID NO: 921

SEQ ID NO: 1585 - protein, 166 aa, Oryza sativa; identical to SEQ ID NO: 922

SEQ ID NO: 1586 - DNA, 573 bp, Oryza sativa; identical to SEQ ID NO: 923

SEQ ID NO: 1587 - protein, 190 aa, Oryza sativa; identical to SEQ ID NO: 924

SEQ ID NO: 1588 - DNA, 387 bp, Oryza sativa; identical to SEQ ID NO: 925

SEQ ID NO: 1589 - protein, 128 aa, Oryza sativa; identical to SEQ ID NO: 926

SEQ ID NO: 1590 - DNA, 624 bp, Oryza sativa; identical to SEQ ID NO: 927

SEQ ID NO: 1591 - protein, 207 aa, Oryza sativa; identical to SEQ ID NO: 928

SEQ ID NO: 1592 - DNA, 357 bp, Oryza sativa; identical to SEQ ID NO: 929

SEQ ID NO: 1593 - protein, 118 aa, Oryza sativa; identical to SEQ ID NO: 930

SEQ ID NO: 1594 - DNA, 321 bp, Oryza sativa; identical to SEQ ID NO: 931

SEQ ID NO: 1595 - protein, 106 aa, Oryza sativa; identical to SEQ ID NO: 932

SEQ ID NO: 1596 - DNA, 405 bp, Oryza sativa; identical to SEQ ID NO: 933

SEQ ID NO: 1597 - protein, 134 aa, Oryza sativa; identical to SEQ ID NO: 934

SEQ ID NO: 1598 - DNA, 321 bp, Oryza sativa; identical to SEQ ID NO: 935

SEQ ID NO: 1599 - protein, 106 aa, Oryza sativa; identical to SEQ ID NO: 936

SEQ ID NO: 1600 - DNA, 390 bp, Oryza sativa; identical to SEQ ID NO: 937

SEQ ID NO: 1601 - protein, 129 aa, Oryza sativa; identical to SEQ ID NO: 938

SEQ ID NO: 1602 - DNA, 504 bp, Oryza sativa; identical to SEQ ID NO: 939

SEQ ID NO: 1603 - protein, 167 aa, Oryza sativa; identical to SEQ ID NO: 940

SEQ ID NO: 1604 - DNA, 369 bp, Oryza sativa; identical to SEQ ID NO: 941

SEQ ID NO: 1605 - protein, 122 aa, Oryza sativa; identical to SEQ ID NO: 942

SEQ ID NO: 1606 - DNA, 531 bp, Oryza sativa; identical to SEQ ID NO: 943

SEQ ID NO: 1607 - protein, 176 aa, Oryza sativa; identical to SEQ ID NO: 944

SEQ ID NO: 1608 - DNA, 759 bp, Oryza sativa; identical to SEQ ID NO: 945

SEQ ID NO: 1609 - protein, 252 aa, Oryza sativa; identical to SEQ ID NO: 946

SEQ ID NO: 1610 - DNA, 432 bp, Oryza sativa; identical to SEQ ID NO: 947

SEQ ID NO: 1611 - protein, 143 aa, Oryza sativa; identical to SEQ ID NO: 948

SEQ ID NO: 1612 - DNA, 462 bp, Oryza sativa; identical to SEQ ID NO: 949

SEQ ID NO: 1613 - protein, 153 aa, Oryza sativa; identical to SEQ ID NO: 950

SEQ ID NO: 1614 - DNA, 360 bp, Oryza sativa; identical to SEQ ID NO: 951

SEQ ID NO: 1615 - protein, 119 aa, Oryza sativa; identical to SEQ ID NO: 952

SEQ ID NO: 1616 - DNA, 423 bp, Oryza sativa; identical to SEQ ID NO: 953

SEQ ID NO: 1617 - protein, 140 aa, Oryza sativa; identical to SEQ ID NO: 954

SEQ ID NO: 1618 - DNA, 402 bp, Oryza sativa; identical to SEQ ID NO: 955

SEQ ID NO: 1619 - protein, 133 aa, Oryza sativa; identical to SEQ ID NO: 956

SEQ ID NO: 1620 - DNA, 405 bp, Oryza sativa; identical to SEQ ID NO: 957

SEQ ID NO: 1621 - protein, 134 aa, Oryza sativa; identical to SEQ ID NO: 958

SEQ ID NO: 1622 - DNA, 423 bp, Oryza sativa; identical to SEQ ID NO: 959

SEQ ID NO: 1623 - protein, 140 aa, Oryza sativa; identical to SEQ ID NO: 960

SEQ ID NO: 1624 - DNA, 426 bp, Oryza sativa; identical to SEQ ID NO: 961

SEQ ID NO: 1625 - protein, 141 aa, Oryza sativa; identical to SEQ ID NO: 962

SEQ ID NO: 1626 - DNA, 522 bp, Oryza sativa; identical to SEQ ID NO: 963

SEQ ID NO: 1627 - protein, 173 aa, Oryza sativa; identical to SEQ ID NO: 964

SEQ ID NO: 1628 - DNA, 363 bp, Oryza sativa; identical to SEQ ID NO: 965

SEQ ID NO: 1629 - protein, 120 aa, Oryza sativa; identical to SEQ ID NO: 966

SEQ ID NO: 1630 - DNA, 330 bp, Oryza sativa; identical to SEQ ID NO: 967

SEQ ID NO: 1631 - protein, 109 aa, Oryza sativa; identical to SEQ ID NO: 968

SEQ ID NO: 1632 - DNA, 309 bp, Oryza sativa; identical to SEQ ID NO: 969

SEQ ID NO: 1633 - protein, 102 aa, Oryza sativa; identical to SEQ ID NO: 970

SEQ ID NO: 1634 - DNA, 402 bp, Oryza sativa; identical to SEQ ID NO: 971

SEQ ID NO: 1635 - protein, 133 aa, Oryza sativa; identical to SEQ ID NO: 972

SEQ ID NO: 1636 - DNA, 432 bp, Oryza sativa; identical to SEQ ID NO: 973

SEQ ID NO: 1637 - protein, 143 aa, Oryza sativa; identical to SEQ ID NO: 974

SEQ ID NO: 1638 - DNA, 432 bp, Oryza sativa; identical to SEQ ID NO: 973

SEQ ID NO: 1639 - protein, 143 aa, Oryza sativa; identical to SEQ ID NO: 974

SEQ ID NO: 1640 - DNA, 432 bp, Oryza sativa; identical to SEQ ID NO: 977

SEQ ID NO: 1641 - protein, 143 aa, Oryza sativa; identical to SEQ ID NO: 978

SEQ ID NO: 1642 - DNA, 498 bp, Oryza sativa; identical to SEQ ID NO: 979

SEQ ID NO: 1643 - protein, 165 aa, Oryza sativa; identical to SEQ ID NO: 980

SEQ ID NO: 1644 - DNA, 573 bp, Oryza sativa; identical to SEQ ID NO: 981

SEQ ID NO: 1645 - protein, 190 aa, Oryza sativa; identical to SEQ ID NO: 982

SEQ ID NO: 1646 - DNA, 516 bp, Oryza sativa; identical to SEQ ID NO: 983

SEQ ID NO: 1647 - protein, 171 aa, Oryza sativa; identical to SEQ ID NO: 984

SEQ ID NO: 1648 - DNA, 363 bp, Oryza sativa; identical to SEQ ID NO: 985

SEQ ID NO: 1649 - protein, 120 aa, Oryza sativa; identical to SEQ ID NO: 986

SEQ ID NO: 1650 - DNA, 417 bp, Oryza sativa; identical to SEQ ID NO: 987

SEQ ID NO: 1651 - protein, 138 aa, Oryza sativa; identical to SEQ ID NO: 988

SEQ ID NO: 1652 - DNA, 426 bp, Oryza sativa; identical to SEQ ID NO: 989

SEQ ID NO: 1653 - protein, 141 aa, Oryza sativa; identical to SEQ ID NO: 990

SEQ ID NO: 1654 - DNA, 423 bp, Oryza sativa; identical to SEQ ID NO: 991

SEQ ID NO: 1655 - protein, 140 aa, Oryza sativa; identical to SEQ ID NO: 992

SEQ ID NO: 1656 - DNA, 435 bp, Oryza sativa; identical to SEQ ID NO: 993

SEQ ID NO: 1657 - protein, 144 aa, Oryza sativa; identical to SEQ ID NO: 994

SEQ ID NO: 1658 - DNA, 426 bp, Oryza sativa; identical to SEQ ID NO: 995

SEQ ID NO: 1659 - protein, 141 aa, Oryza sativa; identical to SEQ ID NO: 996

SEQ ID NO: 1660 - DNA, 423 bp, Oryza sativa; identical to SEQ ID NO: 997

SEQ ID NO: 1661 - protein, 140 aa, Oryza sativa; identical to SEQ ID NO: 998

SEQ ID NO: 1662 - DNA, 333 bp, Oryza sativa; identical to SEQ ID NO: 999

SEQ ID NO: 1663 - protein, 110 aa, Oryza sativa; identical to SEQ ID NO: 1000

SEQ ID NO: 1664 - DNA, 474 bp, Oryza sativa; identical to SEQ ID NO: 1001

SEQ ID NO: 1665 - protein, 157 aa, Oryza sativa; identical to SEQ ID NO: 1002

SEQ ID NO: 1666 - DNA, 435 bp, Oryza sativa; identical to SEQ ID NO: 1003

SEQ ID NO: 1667 - protein, 144 aa, Oryza sativa; identical to SEQ ID NO: 1004

SEQ ID NO: 1668 - DNA, 393 bp, Oryza sativa; identical to SEQ ID NO: 1005

SEQ ID NO: 1669 - protein, 130 aa, Oryza sativa; identical to SEQ ID NO: 1006

SEQ ID NO: 1670 - DNA, 435 bp, Oryza sativa; identical to SEQ ID NO: 1007

SEQ ID NO: 1671 - protein, 144 aa, Oryza sativa; identical to SEQ ID NO: 1008

SEQ ID NO: 1672 - DNA, 426 bp, Oryza sativa; identical to SEQ ID NO: 1009

SEQ ID NO: 1673 - protein, 141 aa, Oryza sativa; identical to SEQ ID NO: 1010

SEQ ID NO: 1674 - DNA, 435 bp, Oryza sativa; identical to SEQ ID NO: 1011

SEQ ID NO: 1675 - protein, 144 aa, Oryza sativa; identical to SEQ ID NO: 1012

SEQ ID NO: 1676 - DNA, 426 bp, Oryza sativa; identical to SEQ ID NO: 1013

SEQ ID NO: 1677 - protein, 141 aa, Oryza sativa; identical to SEQ ID NO: 1014

SEQ ID NO: 1678 - DNA, 453 bp, Oryza sativa; identical to SEQ ID NO: 1015

SEQ ID NO: 1679 - protein, 150 aa, Oryza sativa; identical to SEQ ID NO: 1016

SEQ ID NO: 1680 - DNA, 378 bp, Oryza sativa; identical to SEQ ID NO: 1017

SEQ ID NO: 1681 - protein, 125 aa, Oryza sativa; identical to SEQ ID NO: 1018

SEQ ID NO: 1682 - DNA, 522 bp, Oryza sativa; identical to SEQ ID NO: 1019

SEQ ID NO: 1683 - protein, 173 aa, Oryza sativa; identical to SEQ ID NO: 1020

SEQ ID NO: 1684 - DNA, 393 bp, Oryza sativa; identical to SEQ ID NO: 1021

SEQ ID NO: 1685 - protein, 130 aa, Oryza sativa; identical to SEQ ID NO: 1022

SEQ ID NO: 1686 - DNA, 378 bp, Oryza sativa; identical to SEQ ID NO: 1023

SEQ ID NO: 1687 - protein, 125 aa, Oryza sativa; identical to SEQ ID NO: 1024

SEQ ID NO: 1688 - DNA, 432 bp, Oryza sativa; identical to SEQ ID NO: 1025

SEQ ID NO: 1689 - protein, 143 aa, Oryza sativa; identical to SEQ ID NO: 1026

SEQ ID NO: 1690 - DNA, 291 bp, Oryza sativa; identical to SEQ ID NO: 1027

SEQ ID NO: 1691 - protein, 96 aa, Oryza sativa; identical to SEQ ID NO: 1028

SEQ ID NO: 1692 - DNA, 327 bp, Oryza sativa; identical to SEQ ID NO: 1029

SEQ ID NO: 1693 - protein, 108 aa, Oryza sativa; identical to SEQ ID NO: 1030

SEQ ID NO: 1694 - DNA, 542 bp, Prunus armeniaca; identical to SEQ ID NO: 1031

SEQ ID NO: 1695 - protein, 89 aa, Prunus armeniaca; identical to SEQ ID NO: 1032

SEQ ID NO: 1696 - DNA, 478 bp, Prunus armeniaca; identical to SEQ ID NO: 1033

SEQ ID NO: 1697 - protein, 94 aa, Prunus armeniaca; identical to SEQ ID NO: 1034

SEQ ID NO: 1698 - DNA, 532 bp, Panax ginseng; identical to SEQ ID NO: 1035
  misc_feature (19)..(19): n is a, c, g, or t
  misc_feature (531)..(532): n is a, c, g, or t

SEQ ID NO: 1699 - protein, 96 aa, Panax ginseng; identical to SEQ ID NO: 1036

SEQ ID NO: 1700 - DNA, 844 bp, Prunus persica; identical to SEQ ID NO: 1037

SEQ ID NO: 1701 - protein, 99 aa, Prunus persica; identical to SEQ ID NO: 1038

SEQ ID NO: 1702 - DNA, 791 bp, Prunus persica; identical to SEQ ID NO: 1039

SEQ ID NO: 1703 - protein, 100 aa, Prunus persica; identical to SEQ ID NO: 1040

SEQ ID NO: 1704 - DNA, 831 bp, Prunus persica; identical to SEQ ID NO: 1041

SEQ ID NO: 1705 - protein, 100 aa, Prunus persica; identical to SEQ ID NO: 1042

SEQ ID NO: 1706 - DNA, 640 bp, Prunus persica; identical to SEQ ID NO: 1043

SEQ ID NO: 1707 - protein, 93 aa, Prunus persica; identical to SEQ ID NO: 1044

SEQ ID NO: 1708 - DNA, 406 bp, Pisum sativum; identical to SEQ ID NO: 1045

SEQ ID NO: 1709 - protein, 87 aa, Pisum sativum; identical to SEQ ID NO: 1046

SEQ ID NO: 1710 - DNA, 410 bp, Populus trichocarpa; identical to SEQ ID NO: 1047

SEQ ID NO: 1711 - protein, 96 aa, Populus trichocarpa; identical to SEQ ID NO: 1048

SEQ ID NO: 1712 - DNA, 407 bp, Populus trichocarpa; identical to SEQ ID NO: 1049

SEQ ID NO: 1713 - protein, 99 aa, Populus trichocarpa; identical to SEQ ID NO: 1050

SEQ ID NO: 1714 - DNA, 386 bp, Populus trichocarpa; identical to SEQ ID NO: 1051

SEQ ID NO: 1715 - protein, 99 aa, Populus trichocarpa; identical to SEQ ID NO: 1052

SEQ ID NO: 1716 - DNA, 383 bp, Populus trichocarpa; identical to SEQ ID NO: 1053

SEQ ID NO: 1717 - protein, 90 aa, Populus trichocarpa; identical to SEQ ID NO: 1054

SEQ ID NO: 1718 - DNA, 392 bp, Populus trichocarpa; identical to SEQ ID NO: 1055

SEQ ID NO: 1719 - protein, 94 aa, Populus trichocarpa; identical to SEQ ID NO: 1056

SEQ ID NO: 1720 - DNA, 410 bp, Populus trichocarpa; identical to SEQ ID NO: 1057

SEQ ID NO: 1721 - protein, 92 aa, Populus trichocarpa; identical to SEQ ID NO: 1058

SEQ ID NO: 1722 - DNA, 389 bp, Populus trichocarpa; identical to SEQ ID NO: 1059

SEQ ID NO: 1723 - protein, 93 aa, Populus trichocarpa; identical to SEQ ID NO: 1060

SEQ ID NO: 1724 - DNA, 401 bp, Populus trichocarpa; identical to SEQ ID NO: 1061

SEQ ID NO: 1725 - protein, 98 aa, Populus trichocarpa; identical to SEQ ID NO: 1062

SEQ ID NO: 1726 - DNA, 392 bp, Populus trichocarpa; identical to SEQ ID NO: 1055

SEQ ID NO: 1727 - protein, 99 aa, Populus trichocarpa; identical to SEQ ID NO: 1064

SEQ ID NO: 1728 - DNA, 392 bp, Populus trichocarpa; identical to SEQ ID NO: 1065

SEQ ID NO: 1729 - protein, 91 aa, Populus trichocarpa; identical to SEQ ID NO: 1066

SEQ ID NO: 1730 - DNA, 375 bp, Phaseolus vulgaris; identical to SEQ ID NO: 1067

SEQ ID NO: 1731 - protein, 98 aa, Phaseolus vulgaris; identical to SEQ ID NO: 1068

SEQ ID NO: 1732 - DNA, 528 bp, Phaseolus vulgaris; identical to SEQ ID NO: 1069

SEQ ID NO: 1733 - protein, 156 aa, Phaseolus vulgaris; identical to SEQ ID NO: 1070

SEQ ID NO: 1734 - DNA, 657 bp, Phaseolus vulgaris; identical to SEQ ID NO: 1071

SEQ ID NO: 1735 - protein, 137 aa, Phaseolus vulgaris; identical to SEQ ID NO: 1072

SEQ ID NO: 1736 - DNA, 526 bp, Ricinus communis; identical to SEQ ID NO: 1073

SEQ ID NO: 1737 - protein, 92 aa, Ricinus communis; identical to SEQ ID NO: 1074

SEQ ID NO: 1738 - DNA, 810 bp, Ricinus communis; identical to SEQ ID NO: 1075

SEQ ID NO: 1739 - protein, 161 aa, Ricinus communis; identical to SEQ ID NO: 1076

SEQ ID NO: 1740 - DNA, 1205 bp, Ricinus communis; identical to SEQ ID NO: 1077

SEQ ID NO: 1741 - protein, 168 aa, Ricinus communis; identical to SEQ ID NO: 1078

SEQ ID NO: 1742 - DNA, 1126 bp, Ricinus communis; identical to SEQ ID NO: 1079

SEQ ID NO: 1743 - protein, 142 aa, Ricinus communis; identical to SEQ ID NO: 1080

SEQ ID NO: 1744 - DNA, 737 bp, Ricinus communis; identical to SEQ ID NO: 1081

SEQ ID NO: 1745 - protein, 142 aa, Ricinus communis; identical to SEQ ID NO: 1082

SEQ ID NO: 1746 - DNA, 861 bp, Solanum lycopersicum; identical to SEQ ID NO: 1083

SEQ ID NO: 1747 - protein, 86 aa, Solanum lycopersicum; identical to SEQ ID NO: 1084

SEQ ID NO: 1748 - DNA, 414 bp, Solanum lycopersicum; identical to SEQ ID NO: 1085

SEQ ID NO: 1749 - protein, 99 aa, Solanum lycopersicum; identical to SEQ ID NO: 1086

SEQ ID NO: 1750 - DNA, 499 bp, Solanum lycopersicum; identical to SEQ ID NO: 1087

SEQ ID NO: 1751 - protein, 85 aa, Solanum lycopersicum; identical to SEQ ID NO: 1088

SEQ ID NO: 1752 - DNA, 482 bp, Solanum lycopersicum; identical to SEQ ID NO: 1089

SEQ ID NO: 1753 - protein, 83 aa, Solanum lycopersicum; identical to SEQ ID NO: 1090

SEQ ID NO: 1754 - DNA, 688 bp, Solanum lycopersicum; identical to SEQ ID NO: 1091

SEQ ID NO: 1755 - protein, 83 aa, Solanum lycopersicum; identical to SEQ ID NO: 1092

SEQ ID NO: 1756 - DNA, 704 bp, Solanum lycopersicum; identical to SEQ ID NO: 1093

SEQ ID NO: 1757 - protein, 83 aa, Solanum lycopersicum; identical to SEQ ID NO: 1094

SEQ ID NO: 1758 - DNA, 498 bp, Solanum lycopersicum; identical to SEQ ID NO: 1095
  misc_feature (449)..(449): n is a, c, g, or t

SEQ ID NO: 1759 - protein, 86 aa, Solanum lycopersicum; identical to SEQ ID NO: 1096

SEQ ID NO: 1760 - DNA, 516 bp, Stevia rebaudiana; identical to SEQ ID NO: 1097

SEQ ID NO: 1761 - protein, 99 aa, Stevia rebaudiana; identical to SEQ ID NO: 1098

SEQ ID NO: 1762 - DNA, 500 bp, Solanum tuberosum; identical to SEQ ID NO: 1099
  misc_feature (440)..(440): n is a, c, g, or t

SEQ ID NO: 1763 - protein, 83 aa, Solanum tuberosum; identical to SEQ ID NO: 1100

SEQ ID NO: 1764 - DNA, 675 bp, Solanum tuberosum; identical to SEQ ID NO: 1101
  misc_feature (513)..(513): n is a, c, g, or t

SEQ ID NO: 1765 - protein, 108 aa, Solanum tuberosum; identical to SEQ ID NO: 1102

SEQ ID NO: 1766 - DNA, 670 bp, Solanum tuberosum; identical to SEQ ID NO: 1103

SEQ ID NO: 1767 - protein, 96 aa, Solanum tuberosum; identical to SEQ ID NO: 1104

SEQ ID NO: 1768 - DNA, 774 bp, Solanum tuberosum; identical to SEQ ID NO: 1105
  misc_feature (632)..(632): n is a, c, g, or t

SEQ ID NO: 1769 - protein, 85 aa, Solanum tuberosum; identical to SEQ ID NO: 1106

SEQ ID NO: 1770 - DNA, 707 bp, Solanum tuberosum; identical to SEQ ID NO: 1107

SEQ ID NO: 1771 - protein, 85 aa, Solanum tuberosum; identical to SEQ ID NO: 1108

SEQ ID NO: 1772 - DNA, 467 bp, Solanum tuberosum; identical to SEQ ID NO: 1109

SEQ ID NO: 1773 - protein, 83 aa, Solanum tuberosum; identical to SEQ ID NO: 1110

SEQ ID NO: 1774 - DNA, 477 bp, Solanum tuberosum; identical to SEQ ID NO: 1111

SEQ ID NO: 1775 - protein, 83 aa, Solanum tuberosum; identical to SEQ ID NO: 1112

SEQ ID NO: 1776 - DNA, 676 bp, Tagetes erecta; identical to SEQ ID NO: 1113

SEQ ID NO: 1777 - protein, 110 aa, Tagetes erecta; identical to SEQ ID NO: 1114

SEQ ID NO: 1778 - DNA, 473 bp, Tagetes erecta; identical to SEQ ID NO: 1115

SEQ ID NO: 1779 - protein, 99 aa, Tagetes erecta; identical to SEQ ID NO: 1116

SEQ ID NO: 1780 - DNA, 557 bp, Tagetes erecta; identical to SEQ ID NO: 1117

SEQ ID NO: 1781 - protein, 103 aa, Tagetes erecta; identical to SEQ ID NO: 1118

SEQ ID NO: 1782 - DNA, 556 bp, Tagetes erecta; identical to SEQ ID NO: 1119

SEQ ID NO: 1783 - protein, 116 aa, Tagetes erecta; identical to SEQ ID NO: 1120

SEQ ID NO: 1784 - DNA, 456 bp, Thellungiella halophila; identical to SEQ ID NO: 1121

SEQ ID NO: 1785 - protein, 85 aa, Thellungiella halophila; identical to SEQ ID NO: 1122

SEQ ID NO: 1786 - DNA, 487 bp, Thellungiella halophila; identical to SEQ ID NO: 1123

SEQ ID NO: 1787 - protein, 97 aa, Thellungiella halophila; identical to SEQ ID NO: 1124

SEQ ID NO: 1788 - DNA, 530 bp, Taraxacum kok-saghyz; identical to SEQ ID NO: 1125

SEQ ID NO: 1789 - protein, 122 aa, Taraxacum kok-saghyz; identical to SEQ ID NO: 1126

SEQ ID NO: 1790 - DNA, 512 bp, Taraxacum kok-saghyz; identical to SEQ ID NO: 1127

SEQ ID NO: 1791 - protein, 100 aa, Taraxacum kok-saghyz; identical to SEQ ID NO: 1128

SEQ ID NO: 1792 - DNA, 704 bp, Taraxacum kok-saghyz; identical to SEQ ID NO: 1129

SEQ ID NO: 1793 - protein, 172 aa, Taraxacum kok-saghyz; identical to SEQ ID NO: 1130

SEQ ID NO: 1794 - DNA, 699 bp, Taraxacum kok-saghyz; identical to SEQ ID NO: 1131

SEQ ID NO: 1795 - protein, 168 aa, Taraxacum kok-saghyz; identical to SEQ ID NO: 1132

SEQ ID NO: 1796 - DNA, 686 bp, Taraxacum kok-saghyz; identical to SEQ ID NO: 1133

SEQ ID NO: 1797 - protein, 168 aa, Taraxacum kok-saghyz; identical to SEQ ID NO: 1134

SEQ ID NO: 1798 - DNA, 522 bp, Vitis vinifera; identical to SEQ ID NO: 1135

SEQ ID NO: 1799 - protein, 95 aa, Vitis vinifera; identical to SEQ ID NO: 1136

SEQ ID NO: 1800 - DNA, 494 bp, Vitis vinifera; identical to SEQ ID NO: 1137

SEQ ID NO: 1801 - protein, 95 aa, Vitis vinifera; identical to SEQ ID NO: 1138

SEQ ID NO: 1802 - DNA, 539 bp, Vitis vinifera; identical to SEQ ID NO: 1139

SEQ ID NO: 1803 - protein, 95 aa, Vitis vinifera; identical to SEQ ID NO: 1140

SEQ ID NO: 1804 - DNA, 584 bp, Vitis vinifera; identical to SEQ ID NO: 1141

SEQ ID NO: 1805 - protein, 95 aa, Vitis vinifera; identical to SEQ ID NO: 1142

SEQ ID NO: 1806 - DNA, 726 bp, Vitis vinifera; identical to SEQ ID NO: 1143

SEQ ID NO: 1807 - protein, 104 aa, Vitis vinifera; identical to SEQ ID NO: 1144

SEQ ID NO: 1808 - DNA, 1127 bp, Vitis vinifera; identical to SEQ ID NO: 1145

SEQ ID NO: 1809 - protein, 91 aa, Vitis vinifera; identical to SEQ ID NO: 1146

SEQ ID NO: 1810 - DNA, 546 bp, Vitis vinifera; identical to SEQ ID NO: 1147

SEQ ID NO: 1811 - protein, 95 aa, Vitis vinifera; identical to SEQ ID NO: 1148

SEQ ID NO: 1812 - DNA, 593 bp, Vitis vinifera; identical to SEQ ID NO: 1149

SEQ ID NO: 1813 - protein, 100 aa, Vitis vinifera; identical to SEQ ID NO: 1150

SEQ ID NO: 1814 - DNA, 6 bp, Artificial sequence
  auxin response box
tgtctc

SEQ ID NO: 1815 - DNA, 8 bp, Artificial sequence
  auxin response box
ggtcccat

SEQ ID NO: 1816 - DNA, 6 bp, Artificial sequence
  DST element
atagat

SEQ ID NO: 1817 - DNA, 3 bp, Artificial sequence
  DST element
gta

SEQ ID NO: 1818 - protein, 50 aa, Artificial sequence; identical to SEQ ID NO: 1155
  motif 23

SEQ ID NO: 1819 - protein, 50 aa, Artificial sequence; identical to SEQ ID NO: 1156
  motif 24
  misc_feature (3)..(4): Xaa can be any naturally occurring amino acid
  misc_feature (12)..(13): Xaa can be any naturally occurring amino acid
  misc_feature (15)..(17): Xaa can be any naturally occurring amino acid
  misc_feature (19)..(27): Xaa can be any naturally occurring amino acid
  misc_feature (29)..(32): Xaa can be any naturally occurring amino acid
  misc_feature (34)..(36): Xaa can be any naturally occurring amino acid
  misc_feature (38)..(41): Xaa can be any naturally occurring amino acid
  misc_feature (46)..(46): Xaa can be any naturally occurring amino acid
  misc_feature (48)..(49): Xaa can be any naturally occurring amino acid

SEQ ID NO: 1820 - protein, 21 aa, Artificial sequence
  motif 25
LQSSKQLLKSLSHSSNNVAIP

SEQ ID NO: 1821 - protein, 11 aa, Artificial sequence
  motif 26
  misc_feature (2)..(4): Xaa can be any naturally occurring amino acid
  misc_feature (8)..(8): Xaa can be any naturally occurring amino acid
VXXXKIAXKSQ

SEQ ID NO: 1822 - protein, 11 aa, Artificial sequence
  motif 27
EQIFIDLASRL

SEQ ID NO: 1823 - protein, 11 aa, Artificial sequence
  motif 28
  misc_feature (3)..(5): Xaa can be any naturally occurring amino acid
  misc_feature (7)..(10): Xaa can be any naturally occurring amino acid
VEXXXVXXXXL

SEQ ID NO: 1824 - DNA, 56 bp, Artificial sequence; identical to SEQ ID NO: 1161
  primer: prm09059

SEQ ID NO: 1825 - DNA, 50 bp, Artificial sequence; identical to SEQ ID NO: 1162
  primer: prm09060

SEQ ID NO: 1826 - DNA, 1179 bp, Oryza sativa; identical to SEQ ID NO: 1163

SEQ ID NO: 1827 - DNA, 1587 bp, Arabidopsis thaliana
attatattctcttatatgcactctttcatcaccatcaaagagaaaccaaagctttcatttttatgaatattcaagggtgaatagttagcaaaggaatggcatcaagctcttgtctcaagcaagggtcagtgccaatgaacaatgtttgtgttacccctgaagcaacgtatgaggctgtggttgcagaccctaggcttttcatgacttccttggaaaggctgcactctctcttgggtactaaattcatggttccgatcataggaggaagagatttggacttgcacaagcttttcgttgaggtaacctcacgtggcggaatcaataagatacttaatgaaaggagatggaaagaagtaactgctacatttgtctttcctccaactgcaacaaacgcatcatatgttctgcgcaaatactacttctcgctgctgaacaattatgagcaaatctatttcttcagatctaatggtcagattcctccagactctatgcagagtccatctgctagaccatgctttattcagggagccattagaccttcacaagaacttcaagctctaacctttaccccacagcccaagatcaatactgcagaattcctcggaggatcacttgctggatcaaatgtggttggagtgatcgatggaaaattcgaaagtggttaccttgtaactgtaacaattggatcagagcagcttaaaggagttctgtatcagcttcttcctcagaacacagtttcttatcaaactccgcaacagagtcatggtgtcctcccgaacactctgaacatttctgccaatcctcagggggttgcaggaggagtaacaaaacgccgtaggagaagaaagaaatcagagatcaaaagacgtgatcctgatcatccaaaacccaacagaagtggttataacttctttttcgcagagcagcacgcgagacttaaaccgcttcatcctggtaaggatagggatatcagcaggatgattggtgagctatggaacaagctgaatgaagacgaaaaattgatttaccaagggaaggcaatggaggacaaagagcgatacagaactgaaatggaagattacagagagaaaaaaaagaatggacagctcataagcaacgctgttccgctgcaacagagacttccggagcaaaacgtagacatggctgaagctgaccttccaattgatgaagtcgaagaagatgacgaagaaggtgattcaagcggatcctcaggcgaaagcgagccacatgatgatcagagcatagaaactgatcctgaattggaagagccatctctgaatccctcaggtccaaacctaaaccctaatccgactgagatagtggtggctcctaaggagaaaaacggcgatgttgtgatggaaacatctccattgaagaaagccgatgagccaactgtggcggtgactgctgagcagaactgaagattcttctcttgtttcttactccccgttgccagtttcgtgttccataggtaaatgttagagagaggaaagggcttcagataccttgcttctggcccaagattatgtctttttggttttttttttggtttttttggatttttct

SEQ ID NO: 1828 - protein, 448 aa, Arabidopsis thaliana
MASSSCLKQGSVPMNNVCVTPEATYEAVVADPRLFMTSLERLHSLLGTKFMVPIIGGRDLDLHKLFVEVTSRGGINKILNERRWKEVTATFVFPPTATNASYVLRKYYFSLLNNYEQIYFFRSNGQIPPDSMQSPSARPCFIQGAIRPSQELQALTFTPQPKINTAEFLGGSLAGSNVVGVIDGKFESGYLVTVTIGSEQLKGVLYQLLPQNTVSYQTPQQSHGVLPNTLNISANPQGVAGGVTKRRRRRKKSEIKRRDPDHPKPNRSGYNFFFAEQHARLKPLHPGKDRDISRMIGELWNKLNEDEKLIYQGKAMEDKERYRTEMEDYREKKKNGQLISNAVPLQQRLPEQNVDMAEADLPIDEVEEDDEEGDSSGSSGESEPHDDQSIETDPELEEPSLNPSGPNLNPNPTEIVVAPKEKNGDVVMETSPLKKADEPTVAVTAEQN

SEQ ID NO: 1829 - DNA, 1156 bp, Arabidopsis thaliana
gattattttatttatctcaccaaggaaaacaaaacacaaaacaaacaaacaaacaaacccataaatcaagatctctgttttcagacagattattatcggaacaaaatgtcatcatcaggatccgacaaagagagagagacttttgtctatatggctaagctctccgaacaagccgagcgatacgacgagatggtggagacgatgaagaaagtggcgagggttaatagcgagctgactgtggaagagaggaatctgttgtcggttggttacaagaacgtgatcggagcaagaagagcttcgtggaggataatgtcgtccatcgagcagaaagaagagtctaaaggcaatgaatcaaacgtgaaacaaatcaagggttatcgccaaaaggtagaagatgagctcgctaacatttgccaagacattctcaccatcattgatcagcatctcatccctcacgctacctcaggggaagctaccgtcttctactacaagatgaaaggagattattaccgttacttggctgagtttaagaccgagcaagagaggaaggaagctgctgaacagtctctcaaaggctatgaggctgcaacacaagctgcaagcactgagcttccttcgacccatccaattcgtcttggccttgctcttaacttctctgttttctactatgagatcatgaactctcctgaaagagcttgccatttggctaagcaagccttcgatgaggcgattgcagagttagatactctaagtgaggagtcgtacaaggacagcactttgatcatgcagctcctgagagacaacctcaccctctggacttctgatcttcctgaagatggaggagaagacaacatcaagactgaagaatccaagcaagaacaggccaagcctgccgatgccactgagaactgatcaaagggcttggaagttgaatgagatttagattcgatgtccagaagggggaggcaaattcctttaaattccatagcttggtttcatcaggaagatgagatcagagacaattgaattcaatcctatattgtttcttttttgtattacttttcgtcttctttattttgttctcaattttcatgtcatcaagtattttatgttacgcaattttattatgatttgatcagcatatgcttttgctatc

SEQ ID NO: 1830 - protein, 268 aa, Arabidopsis thaliana
MSSSGSDKERETFVYMAKLSEQAERYDEMVETMKKVARVNSELTVEERNLLSVGYKNVIGARRASWRIMSSIEQKEESKGNESNVKQIKGYRQKVEDELANICQDILTIIDQHLIPHATSGEATVFYYKMKGDYYRYLAEFKTEQERKEAAEQSLKGYEAATQAASTELPSTHPIRLGLALNFSVFYYEIMNSPERACHLAKQAFDEAIAELDTLSEESYKDSTLIMQLLRDNLTLWTSDLPEDGGEDNIKTEESKQEQAKPADATEN

SEQ ID NO: 1831 - DNA, 951 bp, Arabidopsis thaliana
atggcaacaatgaaaataccaatgacggtaccttctcctcgagtcgatgctgaccaactctttaaggccttcaaaggaagaggctgcgatacttcggtgatcatcaacatcttagctcatcgcaatgcaacacaacgagctctcatcgaacaagaatacgaaaccaaattctcggatgacctccgaaaacgtctccactctgagcttcatggtcatctcaagaaagccgttcttttgtggatgcctgaagcagtggagcgagacgcttcaatactgaaacgctccttaagaggagccgtgactgatcataaagcgattgctgagattatatgcacacgatctggctctcagcttcgtcagatcaaacaggtctactcaaacactttcggtgtgaaacttgaagaggacatcgaatccgaagcttctggcaatcacaaaagagttttgctcgcgtatttgaacactacgcgatatgaaggaccagagatcgataatgcgagtgtagagaacgatgctaggactctcaagagcgcggttgcaaggaagcataaatctgatgaccagacgttgattcagatattcactgaccgaagcaggactcatttggtcgctgtaagatctacttaccgttccatgtacggcaaagaacttggaaaggccataagagatgagactcgcgggaacttcgagcatgtccttctaacaattttacaatgtgctgaaaactcttgtttctatttcgcaaaggcattgaggaaatcaatgaaaggattaggaacagatgacacggcgttgataagaatcgtggtgacgagagcagaggtggatatgcagttcatcatcacagaataccgtaagagatacaagaagactttgtacaatgctgttcattctgatacaactagtcattacaggacttttctcctctctcttttaggccccaacgtttga

SEQ ID NO: 1832 - protein, 316 aa, Arabidopsis thaliana
MATMKIPMTVPSPRVDADQLFKAFKGRGCDTSVIINILAHRNATQRALIEQEYETKFSDDLRKRLHSELHGHLKKAVLLWMPEAVERDASILKRSLRGAVTDHKAIAEIICTRSGSQLRQIKQVYSNTFGVKLEEDIESEASGNHKRVLLAYLNTTRYEGPEIDNASVENDARTLKSAVARKHKSDDQTLIQIFTDRSRTHLVAVRSTYRSMYGKELGKAIRDETRGNFEHVLLTILQCAENSCFYFAKALRKSMKGLGTDDTALIRIVVTRAEVDMQFIITEYRKRYKKTLYNAVHSDTTSHYRTFLLSLLGPNV

SEQ ID NO: 1833 - DNA, 3102 bp, Arabidopsis thaliana
acaatgacggacacaacagacgatatcgcagaggaaatctcattccaaagcttcgaagatgactgcaaattgctcggtagtctcttccatgatgtgttacaaagggaagttggcaacccattcatggaaaaagtcgaacgcattcggattcttgctcagagtgcgttaaatttgcgtatggctggtattgaggataccgcaaaccttttggagaagcaattgactagtgaaatatccaaaatgccactagaagaagccttaacgttggctcgtacattcactcattctcttaacttaatgggcattgcagacactcatcacagaatgcacaaagtccataacgttacacaacttgcaagatcttgtgatgatatattcagccagctattgcaaagtggaatctctccagacgaactttataaaactgtttgcaaacaggaggtcgaaattgttcttactgctcatcctacccaaataaatcgaagaaccttgcagtacaagcatattagaattgctcatcttctagaatataacactagatcagatctaagcgttgaagatcgcgaaacgctcattgaagatttggttagagagattacttcactgtggcaaactgatgagcttagacgtcagaaacctactccagttgatgaagctagagctggtctaaacatagtggagcaatccctttggaaagcagtaccacaatacctgcgtcgtgtcagcaattccttgaagaagtttacagggaagccacttccactaacatgcactcctatgaaatttggttcttggatgggaggtgatagagatggaaatccaaatgtcacggcaaaggtcacgaaagaagtatctctcttgtctagatggatggctattgatttgtacataagagaggttgatagcttaagatttgaattatctacggatcgatgcagtgataggttttcaagattagctgataaaattcttgaaaaggattatgatagaggaaaatcaaatttccaaaagcaacaaagttcatcatgcttgccaacacaacttccagctagagctcaccttcctgcttgcattgactttggtgaatcacgacataccaaatttgaaattgcgacgacagattatatgccacccaatctccagaagcagaatgaacaagacttttcggaaagcgactgggagaaaattgacaatggttcgcggtccggtcttacttctcgaggttctttctcatctacttctcaacttcttctccagagaaaactatttgaggaatctcaggttgggaagactagtttccaaaagctactagaaccacctccacttaaacgagctggaagtgctccttatcgtattgttcttggagaagtaaaagaaaagcttgtgaagacaagaagacttcttgaacttcttattgagggtcttccttgtgagtatgaccctaaaaactcctatgaaacatcagatcagcttcttgaaccattgctcctctgttacgaatctctgcaatcatcgggtgctagggtactagctgatggacgacttgctgatctgattcgtagagtttctacctttggaatggttttggtgaaactcgacttacgccaggaagctgcaagacattctgaagctttggatgcaattacaacatacttggatatgggtacttatagtgaatgggatgaagagaagaaattagaatttttgacaagagaactaaaagggaaacgacctcttgttcctcaatgtattaaggttggtcctgacgtcaaagaagtattggacacattccgagtcgctgctgaacttggaagtgaatcacttggcgcttacgttatttctatggcttcaaatgcaagtgatgtcctcgctgtggaacttcttcaaaaagatgctcgacttgctttaactagcgaacatggaaaaccatgtcctggtggaacgctacgagtggtacctctttttgaaacggtgaatgatttaagagccgctggtccttcgataaggaaattgctctcaatcgattggtatagggaacacatccaaaagaaccacaacggtcaccaagaggtgatggttggatactctgattctggaaaagatgctggacgttttactgcagcatgggaactctacaaagctcaagaaaatgttgttgctgcttgtaatgaatttggaatcaaaataacattatttcatggacgaggaggaagcattggtcgtggtggtggtccaacctatctcgctattcagtcccaaccaccaggctctgtaatgggctctttgcgttcaactgagcaaggtgagatggttcaagctaagtttgggataccacaaacggctgttaggcaactagaggtatacacaaccgcggttctactcgctaccttaaagcctcctcagccacctcgagaggaaaaatggcgaaacctaatggaagaaatctctggaatcagttgccaacactatagaagcacagtgtatgaaaacccagagtttctatcttattttcatgaggcaacaccgcaagcagaacttggtttcctcaatataggaagccgaccaacacgaagaaagagctctagtggaataggacatctccgagctatcccttgggtctttgcttggactcaaacaaggtttgttcttccagcttggcttggtgtaggggctggtttaaagggagtttctgagaagggtcatgcggatgatcttaaagagatgtacaaagaatggccattttttcagtccacccttgaacttatagagatggtgttagctaaagcagacattccaatgaccaaacactacgacgaacaacttgtgtctgagaaaagaagaggacttggcactgagctaagaaaagaactaatgactactgagaagtacgttcttgtgataagtggtcacgagaaactcttgcaggacaataagagcttgaagaaactcattgatagtagacttccgtatctcaacgcaatgaacatgttacaagttgaaattcttaagaggctaagacgtgatgaagataacaataagctaagagatgctttgcttatcacaatcaatggtattgctgcaggaatgagaaataccggttaa

SEQ ID NO: 1834 - protein, 1032 aa, Arabidopsis thaliana
MTDTTDDIAEEISFQSFEDDCKLLGSLFHDVLQREVGNPFMEKVERIRILAQSALNLRMAGIEDTANLLEKQLTSEISKMPLEEALTLARTFTHSLNLMGIADTHHRMHKVHNVTQLARSCDDIFSQLLQSGISPDELYKTVCKQEVEIVLTAHPTQINRRTLQYKHIRIAHLLEYNTRSDLSVEDRETLIEDLVREITSLWQTDELRRQKPTPVDEARAGLNIVEQSLWKAVPQYLRRVSNSLKKFTGKPLPLTCTPMKFGSWMGGDRDGNPNVTAKVTKEVSLLSRWMAIDLYIREVDSLRFELSTDRCSDRFSRLADKILEKDYDRGKSNFQKQQSSSCLPTQLPARAHLPACIDFGESRHTKFEIATTDYMPPNLQKQNEQDFSESDWEKIDNGSRSGLTSRGSFSSTSQLLLQRKLFEESQVGKTSFQKLLEPPPLKRAGSAPYRIVLGEVKEKLVKTRRLLELLIEGLPCEYDPKNSYETSDQLLEPLLLCYESLQSSGARVLADGRLADLIRRVSTFGMVLVKLDLRQEAARHSEALDAITTYLDMGTYSEWDEEKKLEFLTRELKGKRPLVPQCIKVGPDVKEVLDTFRVAAELGSESLGAYVISMASNASDVLAVELLQKDARLALTSEHGKPCPGGTLRVVPLFETVNDLRAAGPSIRKLLSIDWYREHIQKNHNGHQEVMVGYSDSGKDAGRFTAAWELYKAQENVVAACNEFGIKITLFHGRGGSIGRGGGPTYLAIQSQPPGSVMGSLRSTEQGEMVQAKFGIPQTAVRQLEVYTTAVLLATLKPPQPPREEKWRNLMEEISGISCQHYRSTVYENPEFLSYFHEATPQAELGFLNIGSRPTRRKSSSGIGHLRAIPWVFAWTQTRFVLPAWLGVGAGLKGVSEKGHADDLKEMYKEWPFFQSTLELIEMVLAKADIPMTKHYDEQLVSEKRRGLGTELRKELMTTEKYVLVISGHEKLLQDNKSLKKLIDSRLPYLNAMNMLQVEILKRLRRDEDNNKLRDALLITINGIAAGMRNTG

SEQ ID NO: 1835 - DNA, 558 bp, Arabidopsis thaliana
atactatcaacttttctctatctatctctctctcttctttttccggcataacttctgtgttaccctaaactccataacctgtttcaccgataaagtgcctttgcttctatctctgtcactcttactacttgttgaacaatattctacaaaaaaatgtcgggaagaagatcacgttcgaggcaatcatcaggaacttcaaggatctcagaagatcaaatcaatgatctgattatcaagttgcaacagcttcttcctgagctcagggacagtcgtcgttccgacaaggtttcagcagcgagggtgttacaagatacgtgcaactacatacggaatctgcatagagaggttgatgatctaagtgagaggctatctgagttactagcaaactcagacactgcacaagctgctttaatcagaagcttacttacccaataattcctatctatctttttcttcttcttcttttttttgtttactataataataataatagtttgcgggtttttttttctatagatgttgatgaccttataaacgtttaatgatacgagttcgtca

SEQ ID NO: 1836 - protein, 93 aa, Arabidopsis thaliana
MSGRRSRSRQSSGTSRISEDQINDLIIKLQQLLPELRDSRRSDKVSAARVLQDTCNYIRNLHREVDDLSERLSELLANSDTAQAALIRSLLTQ

SEQ ID NO: 1837 - DNA, 1370 bp, Arabidopsis thaliana
atgggtcgagtgaaattggagataaaacgaatagaaaacacaacgaatcgacaagttacattctccaaaagacgaaatggtcttataaagaaagcttatgaattgtccattctttgtgacatcgacattgctctcctcatgttctctccctctgatcgccttagcctcttttcgggcaaaacaaggattgaagacgttttctctagatacatcaatctttctgatcaagaacgagagaatgctctagtattccccgatcaaagtcgacgcccagatttccagagcaaagagtatctactccggactttgcagcaactcaaggctgagaatgatattgctcttcaacttaccaaccctacagctatcaactccgacgtcgaggaacttgagcatgaagtttataagttacaacaacaacttctcatggcagaggaagaactaaggaaatacgaaccagatccaatcaggtttacaacaatggaagagtacgaaacttgtgagaagcagctcatggacaccttaacacgtgtcaatcaacgacgggaacatatattgagtcaagaccaattatcttcatatgaagcatctgctttacaacaacagcaaagcatgggtgggccttttggaaacgacgtcgttggaggatggctgactgaaaatgggcctaacgaagcccatttattcgacgcatcggcacattcagcaatgtatgaaactttattgcaaggaagtagctcaagctcgaaccaaaacaacattatgggtgaatccaatgtgtcaaatcataacggtgacatgtttcaagaatgggcccaagcctataattctactacggcccataacccttcgactctatttcctcctatgcagcatcagcatggactggtggttgatcccaatatagaagaaattgaaataccggttatgaagaaggatgcacaagcagaccacgaggtctccgactatgatataagaatgcctcagctcagtagccaataatctcaaggaatttcaattttaccatatattattgacataatttatacgttttttcttttattttttagaaaagttaacaatatatatacggttttatttatctatgaagacaagatattactatatatatgtttatataaaacacaacttccacacttaagagttaagaccttaaccttttattgacttgtatattgtacataacgtttctattataaaaaaaacattttactgttaaacaatgtatatactatatattatgtatataaaacatgaaaaacatgttttgctctcaaatatgcatatgattatgtcaattttgcttgtctaatttttttaaaagatcattcaacttttggttgagtgaagat

SEQ ID NO: 1838 - protein, 332 aa, Arabidopsis thaliana
MGRVKLEIKRIENTTNRQVTFSKRRNGLIKKAYELSILCDIDIALLMFSPSDRLSLFSGKTRIEDVFSRYINLSDQERENALVFPDQSRRPDFQSKEYLLRTLQQLKAENDIALQLTNPTAINSDVEELEHEVYKLQQQLLMAEEELRKYEPDPIRFTTMEEYETCEKQLMDTLTRVNQRREHILSQDQLSSYEASALQQQQSMGGPFGNDVVGGWLTENGPNEAHLFDASAHSAMYETLLQGSSSSSNQNNIMGESNVSNHNGDMFQEWAQAYNSTTAHNPSTLFPPMQHQHGLVVDPNIEEIEIPVMKKDAQADHEVSDYDIRMPQLSSQ

SEQ ID NO: 1839 - DNA, 1190 bp, Arabidopsis thaliana; identical to SEQ ID NO: 217

SEQ ID NO: 1840 - protein, 280 aa, Arabidopsis thaliana; identical to SEQ ID NO: 218

SEQ ID NO: 1841 - DNA, 1760 bp, Arabidopsis thaliana
atatatacaaaaatatatacaatatacaaacatcgtatatatcaagtaacagagagaaaaatcttttttcttcctctccttgatcggagggtcgccgtgttgaaaaggatggatggtggggagagggttgaagaaagggccgtggacaacgacggaggatgcgatcttgacggagtacgtgagaaaacacggtgaaggtaattggaacgccgtgcaaaagaactcaggtttgctccggtgtggcaaaagttgccgtctacggtgggcgaatcatctccggccaaatctaaagaaaggatcttttactcctgatgaagaaaagatcatcatcgaccttcacgctaagcttggaaacaaatgggctcgtatggcttctcagttacctggaagaacagacaatgagatcaagaactattggaacacgaggatgaagagaagacaaagagctggtttgcctttataccctcatgagattcaacatcaagggattgatattgatgatgagtttgagtttgatttaacttcctttcagttccaaaaccaagatcttgatcataaccaccaaaatatgattcagtacactaattcttctaatacttcatcatcctcgtcttcattctcttcttcatcttctcaaccatcaaaaaggctgcgtcctgatcctttagtctctactaatcccggcctaaacccgatccccgattcttcgatggattttcaaatgttctctctttacaacaatagccttgagaatgacaataaccagtttggtttctctgttcctttgtcctcatcatcctcgtctaacgaggtgtgtaatcccaaccacatccttgagtacatctccgagaattcggacacaagaaataccaataagaaagacattgatgctatgagttatagttcattgcttatgggagatcttgagataagatcgagttctttccctttaggactagacaatagcgtcctagagcttccttcaaaccaaagaccgacccattcgttcagttctagtcctattattgacaatggtgtccatcttgagccaccttctggcaatagtggactacttgatgccctcttggaggagtctcaagccttgtctcgaggcggactcttcaaggacgttagggtttcctccagtgacctatgtgaggttcaagataaaagggtgaagatggactttgagaatcttttaatagatcatctaaactcttctaatcattcatcattgggagcaaaccctaatattcacaacaagtacaatgagccaacaatggtaaaagtaacggtggatgatgatgatgaattattgacgagccttctcaacaacttcccttcaaccacaacacctttgcctgattggtatcgggtgacagaaatgcaaaacgaggcctcatatcttgccccaccaagtggaattcttatgggaaaccatcaaggtaacggcagggtggaaccacccacggtgccgccttcgtccagtgtagatcctatggcctcgttggggtcatgctattggagcaacatgcctagcatctgttagtttggaacctgcccatgagcaaaaatcatatttctttgatttgaaaaaaagagaaagctaattgtgagcttaacttgtgtttaatgtgtaaaatcttcttcaaagtgttttcaacttgggatgtgctatgaactgtatgttaacatgttttcaaggaacaaaagagaaattgaaagagatgaggaatgagcatataattttcttttgggtt

SEQ ID NO: 1842 - protein, 478 aa, Arabidopsis thaliana
MVGRGLKKGPWTTTEDAILTEYVRKHGEGNWNAVQKNSGLLRCGKSCRLRWANHLRPNLKKGSFTPDEEKIIIDLHAKLGNKWARMASQLPGRTDNEIKNYWNTRMKRRQRAGLPLYPHEIQHQGIDIDDEFEFDLTSFQFQNQDLDHNHQNMIQYTNSSNTSSSSSSFSSSSSQPSKRLRPDPLVSTNPGLNPIPDSSMDFQMFSLYNNSLENDNNQFGFSVPLSSSSSSNEVCNPNHILEYISENSDTRNTNKKDIDAMSYSSLLMGDLEIRSSSFPLGLDNSVLELPSNQRPTHSFSSSPIIDNGVHLEPPSGNSGLLDALLEESQALSRGGLFKDVRVSSSDLCEVQDKRVKMDFENLLIDHLNSSNHSSLGANPNIHNKYNEPTMVKVTVDDDDELLTSLLNNFPSTTTPLPDWYRVTEMQNEASYLAPPSGILMGNHQGNGRVEPPTVPPSSSVDPMASLGSCYWSNMPSIC

SEQ ID NO: 1843 - DNA, 1124 bp, Arabidopsis thaliana
atgtcacgtgactctcctcccgcatttgatccatacaaacacctcaacataacaatcaaccccaacggctcttgcacgcgccatttcgtttggccgagggttgaacccgacccggatccatgccccggcaagctcgccgcttccaaagacgtaaccattaaccacgaaaccggcgtgtccgtacgtattttccgaccaactaatctaccatccaatgataacgccgtggctcgtctcccaatcatcatccatctccacggctccggttggatcctttacccggccaattctgccgcaaatgaccgttgttgctctcaaatggccagtgagttaacagtgattgttgtctccgtacactatcgtttgcctccggagcatagactcccagctcaatacgacgacgcattagatgctctgctttgggtcaaacaacaagtcgttgactcaaccaacggcgagccgtggcttaaggactacgccgatttctcacggtgttacatatgcggttcgagtaacggcgctaacatcgctttccaattggcactgagatcgttagaccacgatttaacgccgttacaaatcgacggttgcgtgttttaccaaccgctttttggcggtaaaacgaggacaaaatcggagcttaagaatttcgccgacccggtaatgccggttcctgcggttgacgccatgtgggaactatctttgccggtaggtgttgatcgggatcataggtactgtaatccattgggttacttgccgcaaaaggagaaagttggacggcttggacggtgtttggtgatcggttacggcggagacacgtcgttggatcgacaacaagatttcgtgaatttgttggttgcagctggagttagggttgaagcaaggtttgacgacgccggtttccatagcatcgagctggtcgatccacgacgagccgtcgctcttcttaatatgattagagattttataagttgattattcttttcaagttttcatctaagcattctataaccgttaattttctcattttctattttgtatacatatgacattttacattgaacgttgttacatagcacaaatgttacttcttttgtgttttttgataaaatgttaacattgtt

SEQ ID NO: 1844 - protein, 324 aa, Arabidopsis thaliana
MSRDSPPAFDPYKHLNITINPNGSCTRHFVWPRVEPDPDPCPGKLAASKDVTINHETGVSVRIFRPTNLPSNDNAVARLPIIIHLHGSGWILYPANSAANDRCCSQMASELTVIVVSVHYRLPPEHRLPAQYDDALDALLWVKQQVVDSTNGEPWLKDYADFSRCYICGSSNGANIAFQLALRSLDHDLTPLQIDGCVFYQPLFGGKTRTKSELKNFADPVMPVPAVDAMWELSLPVGVDRDHRYCNPLGYLPQKEKVGRLGRCLVIGYGGDTSLDRQQDFVNLLVAAGVRVEARFDDAGFHSIELVDPRRAVALLNMIRDFIS

SEQ ID NO: 1845 - DNA, 1073 bp, Arabidopsis thaliana
ggttgggaaaaatccaactagagaagagcataaaagtagacatctgatcaacccgacccataataacctttttttgttggccgcgtaatatgttcgagcgcggccatcacactaagaacattcataaaaaaaaatccacaggattcaaagcccttaagctttgatcatagtctcttaaagaggtagtaaaaccataaactagagccccaatttgcattcacaagccacctaacacattagcttctggtcatttctgctttatatacacatcaagtaaaaaatggtgagaagaagagaaggtcttacattgccaatcataaaaccggcgcttcccgaggtcagatcagcagcgacaacgccggtggcctcacagaaaccaaaacatcgtttatcgaaacaactatctatgtgtgaaacaccaagagacgttgcttgggaaagaagaaggcgtcagatgataatgattcaagaaaagaagctgcttcataagggcgcttcagacaatctttgtatacaggcgaatctaacggatgaagatttaaacgagctaaaaggatcgattgagctaggtttcggtttcaatgaagaagcaggacaaaagctttgtaatacattaccagctcttgatctttactttgcagtgaatcgtcagctctcgcctcttccttcacctagcagcagccgtagcagcagtgcatctgcgtcaactttctcatacagtataccttgtagtccaaagaaaactgattcagattctgttaaaatcttatgcccaggggacgatcctcaacaaatgaagcagaggttgagacattgggcacaagcagttgcatgttctgttatgcagtcttattgaagattataagcactcagattttcttttgagagataggaagaagcgaatcttttacaattaggattcgaaagaaacaaaaaacaactagaaaattttggagaaaaagagatgaaaattgtggctctgtatataactcacaagatgagagaaagaaaaagaaaaacacctcttgttcataagctgtaatgatgtatacaaaaaaaaagattacaatatg

SEQ ID NO: 1846 - protein, 191 aa, Arabidopsis thaliana
MVRRREGLTLPIIKPALPEVRSAATTPVASQKPKHRLSKQLSMCETPRDVAWERRRRQMIMIQEKKLLHKGASDNLCIQANLTDEDLNELKGSIELGFGFNEEAGQKLCNTLPALDLYFAVNRQLSPLPSPSSSRSSSASASTFSYSIPCSPKKTDSDSVKILCPGDDPQQMKQRLRHWAQAVACSVMQSY

SEQ ID NO: 1847 - DNA, 1387 bp, Arabidopsis thaliana
atggcctcaaggagcctctcctatacacaactcctaggcctcctgtcctttatactcctcttggtcacaaccaccactatggcggttcgtgttggagtcattcttcataagccttctgctccaactcttcctgttttcagagaagccccggcttttcgaaacggtgatcaatgcgggactcgtgaggctgatcagattcatatcgccatgactctcgacacaaactacctccgtggcacaatggctgccgttttgtctctccttcaacattccacttgccctgaaaacctctcttttcatttcctgtcccttcctcatttcgaaaacgaccttttcaccagcatcaaatcaacctttccttacctaaacttcaagatttatcagtttgatccaaacctcgtccgcagcaagatatcgaaatccatcaggcaagcccttgatcagcctcttaactacgcaagaatctacctcgcggatatcatccctagcagcgttgacaggatcatctacttagactcagacctcgttgtggtagacgacatagagaagctgtggcatgtggagatggaaggtaaagtggtggctgctcccgagtactgccacgcaaacttcacccattatttcacaagaactttctggtcagacccggtattggtcaaagttcttgaaggaaaacgtccgtgttatttcaacacaggggtgatggttgtggatgtaaacaaatggaggaaaggaatgtatacacagaaggtagaagagtggatgacaattcagaagcagaagaggatataccatttgggatcattacctccgtttctgctgatattcgccggtgatataaaagcggttaatcataggtggaaccagcatggtctaggaggtgataatttcgaaggaagatgtagaacgttgcatccgggaccgataagtcttcttcactggagtggaaaagggaagccatggttaagactagattcaaggaagccttgtatcgttgatcatctatgggcaccgtatgatctgtaccgttcatcaagacattcattagaagagtagagaggcaaaagaaaaaaaccattaaacatggcacatataggagaggagaagatacaaaagaaagcaggggtttttagcgatcaaagagagccaaaaatgtttcattacaaagtgaaaaaaagttgtaatgttaaacacattgttgtgcatttgagctcagagtgtgtttcatcacaagaagagatagatggtattatcatcatcatcattttttttttctcctttcttcggttttgtttccctctctttgattcaaacctttagaatattcctcgtgtaatatacataggtacaaacaaaatggaggattaaattcattctttttataaac

SEQ ID NO: 1848 - protein, 351 aa, Arabidopsis thaliana
MASRSLSYTQLLGLLSFILLLVTTTTMAVRVGVILHKPSAPTLPVFREAPAFRNGDQCGTREADQIHIAMTLDTNYLRGTMAAVLSLLQHSTCPENLSFHFLSLPHFENDLFTSIKSTFPYLNFKIYQFDPNLVRSKISKSIRQALDQPLNYARIYLADIIPSSVDRIIYLDSDLVVVDDIEKLWHVEMEGKVVAAPEYCHANFTHYFTRTFWSDPVLVKVLEGKRPCYFNTGVMVVDVNKWRKGMYTQKVEEWMTIQKQKRIYHLGSLPPFLLIFAGDIKAVNHRWNQHGLGGDNFEGRCRTLHPGPISLLHWSGKGKPWLRLDSRKPCIVDHLWAPYDLYRSSRHSLEE

SEQ ID NO: 1849 - DNA, 1453 bp, Arabidopsis thaliana
aaatttttgaaacccaatttcagggcacgattccacaacctctttcttttcttctagatctacgtaaattcatcagctagagattgaaaaatggcggacggtgaagatattcagccgctcgtttgcgataacgggactggaatggtcaaggctggttttgcaggtgatgatgctcctagagctgtattcccaagtatcgttggccgtccacgtcacacgggagtgatggttggaatgggacaaaaggatgcatacgtcggagacgaggcacagtcgaaacgtggtatcttgactctcaagtatccaattgagcatggtattgtcaacaactgggatgatatggagaagatttggcatcacactttctacaatgagctgcgtgttgccccggaagagcatccggttttgctaaccgaagcgccgcttaatccgaaggctaaccgtgagaagatgacacagatcatgtttgaaacattcaacactcctgctatgtatgttgccattcaagctgttctctccctctatgctagtggccgtactactggtattgttttggactctggagatggtgtgagccacacggtaccaatctacgagggttatgcacttccacacgcaatcctgcgtcttgatcttgcaggtcgtgacctaaccgaccacctcatgaaaatcctgacagagcgtggttactcattcaccacaactgctgagcgtgagattgtcagagacatgaaggagaagctctcgtacattgccttggactatgagcaagagcttgagacttccaaaaccagctcatctgtggagaagagcttcgagctgccagacggtcaagtgataaccatcggggcagagcgtttccggtgtcctgaagttctgttccagccatccatgatcggaatggaaaatccgggaattcatgaaactacttacaactcaatcatgaaatgtgatgtggatatcaggaaggatctttatggaaacattgtgcttagtggtggcaccacaatgtttggcgggattggtgataggatgagtaaagaaatcaccgcgttggcgccgagcagtatgaagatcaaagtggttgctccaccggaaaggaagtacagtgtttggatcggtggctctatcttggcttctctcagtactttccagcagatgtggattgcgaaagccgagtatgatgaatctggaccgtcgatcgtccacaggaagtgcttctgatcaaaagtcaccaagtaaaacaagagcggtaaaaattttgatatcagtttttcaccctgaagccatttgctataattactcacaacttctctatttgtgttcttttattcttgtccctcattgttcattttaatctctcttttgcaacaaagcaacttaaaaaaacagatcagtcattaacagaatgttattattatatgtatacatattagtatacacccattatctt

SEQ ID NO: 1850 - protein, 377 aa, Arabidopsis thaliana
MADGEDIQPLVCDNGTGMVKAGFAGDDAPRAVFPSIVGRPRHTGVMVGMGQKDAYVGDEAQSKRGILTLKYPIEHGIVNNWDDMEKIWHHTFYNELRVAPEEHPVLLTEAPLNPKANREKMTQIMFETFNTPAMYVAIQAVLSLYASGRTTGIVLDSGDGVSHTVPIYEGYALPHAILRLDLAGRDLTDHLMKILTERGYSFTTTAEREIVRDMKEKLSYIALDYEQELETSKTSSSVEKSFELPDGQVITIGAERFRCPEVLFQPSMIGMENPGIHETTYNSIMKCDVDIRKDLYGNIVLSGGTTMFGGIGDRMSKEITALAPSSMKIKVVAPPERKYSVWIGGSILASLSTFQQMWIAKAEYDESGPSIVHRKCF

SEQ ID NO: 1851 - DNA, 1848 bp, Arabidopsis thaliana
atgccatctgttcttttttagtttaagctatatccgctccgccgcagagatatatatagatatttctataaatatgtttttgtatatatacacagagagttttgattaaggaagaaaaatccttagatcattttttttttgttatctttgtttcgtttttctggtagaagagagaagaaggagagacgaattggcagctaagcgattctctctctttctctctttctcttctcgtgtaatcttttggtgttcttgaaaccacttttttttttgttaattcctctgtttccttggaattgttttctgcttttttaagaagaaaaaaacgatgaatgtggtgcggagattaacgagtattgcctctggacgtaatttcgtttcttctgataacgtaggagaaactgagacgccgagatcaaagcctaaccagaatcgtgaagaaacagagtctacggaaactacgtcgtacgagaaagattctgtctcttcctcagagaactctgatcatttaccaaaggaaatccgtgaggatatggactgtggaatcatcaagggaaatggaacagaatctggacggattattaccaccaaaaagaagggtttgaatgatcaaaaagacaagacaatctcttacagagctgaacatgtaattggcactggctcattcggtgttgtctttcaggctaagtgcttagagacggaagaaaaagtagcaataaagaaagtgttacaggacaagagatacaaaaacagagaacttcagatcatgcgaatgcttgatcatcctaatgtcgttgagctcaagcattctttcttttccacgactgagaaagacgagctttatcttaaccttgttcttgagtatgtacccgagactatttaccgcgcttccagatcttacaccaagatgaatcagcatatgcctttgatttatattcagctctacacctatcagatttgccgtgctatgaattatctgcatcaagtggttggagtgtgtcaccgtgacattaagccgcagaatctgttggtcaataatgttacgcatgaagtaaagatatgcgattttgggagcgccaaaatgctgattccaggagaaccaaatatatcttacatatgctcaaggtattacagagctcctgaactcatatttggagcaaccgaatacacaagtgcgatcgatatgtggtctgtaggttgtgtcatggctgagctttttcttggacatcctctattccctggagaaaccagtgttgatcaattggtggagatcattaagattttagggacaccagcaagagaagagataaagaacatgaatcctcgttacaatgattttaagttccctcagatcaaagctcagccgtggcacaagattttccggagacaggtatctccagaagcaatggatcttgcctctagattgctccagtattcaccaaacctgagatgcacagcgcttgaagcatgtgcacacccattcttcgatgatctgagagacccgagagcatccttgcctaatggaagagcacttcctccattgtttgatttcacagctcaagaacttgctggggcatctgttgaactgcgtcatcgcttaatacctgagcatgcaaggaaatgaccatttgggttaatggctgcttctctacgcagatgttgatatataaatctttttttattttgagagtttcttgttcacaagtatagcattgtgctggttatgaaccctcactgacctctgcaaccacatcgactagcagtttgaaagtgtataattgtaagtttgtaactttgtagctttcattgttgcagacagaaatgcagaattttccgagttttccttct

SEQ ID NO: 1852 - protein, 431 aa, Arabidopsis thaliana
MNVVRRLTSIASGRNFVSSDNVGETETPRSKPNQNREETESTETTSYEKDSVSSSENSDHLPKEIREDMDCGIIKGNGTESGRIITTKKKGLNDQKDKTISYRAEHVIGTGSFGVVFQAKCLETEEKVAIKKVLQDKRYKNRELQIMRMLDHPNVVELKHSFFSTTEKDELYLNLVLEYVPETIYRASRSYTKMNQHMPLIYIQLYTYQICRAMNYLHQVVGVCHRDIKPQNLLVNNVTHEVKICDFGSAKMLIPGEPNISYICSRYYRAPELIFGATEYTSAIDMWSVGCVMAELFLGHPLFPGETSVDQLVEIIKILGTPAREEIKNMNPRYNDFKFPQIKAQPWHKIFRRQVSPEAMDLASRLLQYSPNLRCTALEACAHPFFDDLRDPRASLPNGRALPPLFDFTAQELAGASVELRHRLIPEHARK

SEQ ID NO: 1853 - DNA, 1385 bp, Arabidopsis thaliana
cttgtcttctctaaccctctaaattctctttggtcgggatcactggaaagaaatgtataatctcactttctctccatcattgtcctcttctttgctctcttttacacaacaaactcctgcagccatagtgtcctcttctcctccggatttagtacttcaacaaaaactccggtttgtcgtggaaacctcaccggaccgatgggcttatgtcattttttggcaaaagatgtttgatgatcaatcggaccggtcttacttggtttgggttgatggtcatttctgtggaaacaagaacaacaattcccaagaaaattatacaacaaacagcatcgagtgtgagctgatgatggacggtggagatgatctggagttgttctatgccgcatcgttttacggtgaagatagatcgccgagaaaggaagtatccgatgaatctttggtttggttaaccggtcccgacgagctccggtttagcaactacgagagggctaaagaagccggttttcacggggtacacacattggtctccatacccatcaacaatggcattatcgaacttggttcgtctgaatcaattatacaaaaccggaactttataaaccgagtcaagtccatattcgggtcgggtaaaacaacaaaacacactaaccaaaccggttcttaccctaaaccggcggtatcagatcattcgaaaagcggaaatcagcaattcgggtcggaaagaaaacggaggaggaaacttgagacgacaagggtagctgcggcgacgaaagagaaacatcatccggcggttttgtcccacgtggaagcggagaagcaacggagagagaagctaaaccaccggttttacgctctacgtgccatcgtaccaaaagtgtcacgaatggacaaagcgtcacttttatccgacgcagtttcgtacatagaaagtcttaaatccaaaatcgatgatctcgaaactgagatcaagaaaatgaagatgacggagacagataaattagacaacagcagcagcaatacgtctccgtcttccgttgagtaccaagttaaccagaaaccttcaaaatcaaacagaggctctgacttggaagtgcaagtgaagatcgtcggagaagaagccataattagggttcagacagagaatgtgaaccatcctacgtcggcattgatgagtgcgttaatggaaatggattgtcgtgtacaacacgcgaacgcgtcgcgcttgagtcaggttatggttcaagatgttgttgttttggttccagaaggattaagatcggaagataggcttaggaccacacttgtccgaaccctaagcctataacaatttctttgttttgtgacgtcaacataggatgtgataataatttttgtttttttttgcg

SEQ ID NO: 1854 - protein, 423 aa, Arabidopsis thaliana
MYNLTFSPSLSSSLLSFTQQTPAAIVSSSPPDLVLQQKLRFVVETSPDRWAYVIFWQKMFDDQSDRSYLVWVDGHFCGNKNNNSQENYTTNSIECELMMDGGDDLELFYAASFYGEDRSPRKEVSDESLVWLTGPDELRFSNYERAKEAGFHGVHTLVSIPINNGIIELGSSESIIQNRNFINRVKSIFGSGKTTKHTNQTGSYPKPAVSDHSKSGNQQFGSERKRRRKLETTRVAAATKEKHHPAVLSHVEAEKQRREKLNHRFYALRAIVPKVSRMDKASLLSDAVSYIESLKSKIDDLETEIKKMKMTETDKLDNSSSNTSPSSVEYQVNQKPSKSNRGSDLEVQVKIVGEEAIIRVQTENVNHPTSALMSALMEMDCRVQHANASRLSQVMVQDVVVLVPEGLRSEDRLRTTLVRTLSL

SEQ ID NO: 1855 - DNA, 1362 bp, Arabidopsis thaliana
aatggattacttttcttccacacatatataacttaactctctctttttctcttttgctttaaccccctcaaagaaaagataagagccttttaaagttttttttttaccttctcttcatggacttgtctgtacttgataggcttaagtggctgcaacagcaacaaatggtttcacctgagtttcttcagatacttggctcagatgggagagaagagctcaaaagagttgagagttacttgggaaacaacaatgatgagctgcagagtttcagacattttcccgaattcggaccggattatgatactactgatggctgcatttctaggacaagtagcttccatatggagccagtgaagaataatggacacagcagagccattaccttgcagaacaagagaaaaccagagggtaagacagaaaagagagagaagaagaagatcaaagcagaggatgaaacagagccaagcatgaaagggaaatcaaacatgagtaacacagagacatcttcagaaattcagaaaccagattacattcatgttagggctagacgaggtgaagccaccgacagacatagcttagcagagagggcaagaagagaaaagataagcaagaagatgaaatgtctacaagatattgttcctggatgcaacaaagttactggaaaagctggtatgcttgatgagatcatcaactatgtccaatctctgcaacaacaagtcgagttcttgtcgatgaaactctctgtcataaatccagaacttgagtgtcatatcgatgatttatccgcaaaacagtttcaggcttacttcacaggtcctccagaaggtgactcgaagcagtcaatcatggcggattttcggtcttttccattacatcagcaaggatctttagattactcagtcataaactcagaccacaccacatctctcggcgctaaagatcatacatcatcaagctgggaaactcactcacagtgtctttacaacagcttgagaaccgattctgtttccaatttcttcagcctcaagtaaaaaaattagggatagcctcattaaaaaaatcgcggttttttgttgttgtcttatccatttatctatcttatctgaaatttgaaccaaaagagacagaggaaaccaatccaaagatctttctcaatctattatcttcatacaaatatagtgatttacatatattccaggggatatgtatatgtgtagaagaaagagaaaaaactcttgtggtcatagcaattcctttttttgtacattgtagaatcaaactcttgtggtcgtaacaattatttccttcacaaattacaactacacttgtattaatggagatgccttttggcctggtatcaac

SEQ ID NO: 1856 - protein, 304 aa, Arabidopsis thaliana
MDLSVLDRLKWLQQQQMVSPEFLQILGSDGREELKRVESYLGNNNDELQSFRHFPEFGPDYDTTDGCISRTSSFHMEPVKNNGHSRAITLQNKRKPEGKTEKREKKKIKAEDETEPSMKGKSNMSNTETSSEIQKPDYIHVRARRGEATDRHSLAERARREKISKKMKCLQDIVPGCNKVTGKAGMLDEIINYVQSLQQQVEFLSMKLSVINPELECHIDDLSAKQFQAYFTGPPEGDSKQSIMADFRSFPLHQQGSLDYSVINSDHTTSLGAKDHTSSSWETHSQCLYNSLRTDSVSNFFSLK

SEQ ID NO: 1857 - DNA, 1404 bp, Arabidopsis thaliana
gtaatgatttctcctttccttgtctatatatatggggtaaggacacaagtttgttttctggaattttgcctcatcttagatattgtactctggaagaatgtttcaaagtgatcttcctataaatggagcaatgcaaatgccttgagtcagcaagggcacagggataattgtggagcatggcgctgatgatggtaatgaatgtggagacggagaggctgaggttagggacacaaatgatggagctgttgtaaggacgcgtggatcatccaaacacgtttccatgtcaatcaaacaagggaaaaaaggaataaatcaagacgccatgacagtctgggagaactttggtggggaagaagatacgatcttttgcggtgtatttgacggtcacggtcccatgggtcacaagatttctcgtcacgtatgtgaaaatttaccttcgagggtccattcaaaaattagatcttccaaatctgccggcgatgaaaacatagagaataatagttcacagagtcaggaggaactcttccgtgaattcgaggacattctagtgacattcttcaagcaaatagacagtgaacttggtctcgactctccttatgatagtttttgcagcggtacaactgctgtaactgtctttaaacaggctgactgtttggtgatcgccaacttgggacattcacgagccgttcttggcacccgaagcaagaacagtttcaaagctgtccaactcacggttgatctgaaaccctgtgtccaacgcgaagcagagagaatagtgtcatgcaagggaagggtgtttgctatggaagaggaacccgatgtgtatagagtgtggatgcctgatgatgattgcccggggctcgcaatgtcaagggcttttggtgatttctgcctcaaagactatggacttgtctgcattcctgacgtcttctgcagaaaagtcagcagagaagacgagtttgtggttctagctactgatgggatttgggatgttttgtcaaacgaagaagtggtgaaagttgtaggttcctgcaaggaccggtcagttgcagctgagatgttggttcagcgagccgctcggacttggagaacaaagtttccagcctcaaaagctgatgactgtgcggtggtggtgctttacctaaaccaccggccttacccaagagaaggaaacgtgagccgagcaatatcaactatttcctggagatcaaataagagcaataacgagtgttatggagccgcaccattgtcaccattgggtctatcccaaagggtttcatagtaggataattgttactgttgttgtttctaactgtttagtaaaatttgaacctgttgaggtgtcgatattactcaacatcaactttatttgtgtgtgaaataattttgtgttctgtttgtttt

SEQ ID NO: 1858 - protein, 333 aa, Arabidopsis thaliana
MSIKQGKKGINQDAMTVWENFGGEEDTIFCGVFDGHGPMGHKISRHVCENLPSRVHSKIRSSKSAGDENIENNSSQSQEELFREFEDILVTFFKQIDSELGLDSPYDSFCSGTTAVTVFKQADCLVIANLGHSRAVLGTRSKNSFKAVQLTVDLKPCVQREAERIVSCKGRVFAMEEEPDVYRVWMPDDDCPGLAMSRAFGDFCLKDYGLVCIPDVFCRKVSREDEFVVLATDGIWDVLSNEEVVKVVGSCKDRSVAAEMLVQRAARTWRTKFPASKADDCAVVVLYLNHRPYPREGNVSRAISTISWRSNKSNNECYGAAPLSPLGLSQRVS

SEQ ID NO: 1859 - DNA, 1140 bp, Arabidopsis thaliana
aaaacacattctgagaagaagaagaagaaaataagaaaaaacaaaagatgaaaaccattatcctttttgtaacatttcttgctctttcttcttcatctctagccgatgagacagagactgaatttcattacaaacccggtgagatagccgatccctcgaaatggagcagtatcaaggctgaatggaaaatttgcgggacagggaagaggcaatcgccaatcaatcttactccaaaaatagctcgcattgttcacaattctacagagattcttcagacatattacaaacctgtagaggctattcttaagaaccgtggattcgacatgaaggttaagtgggaagacgatgcagggaagatcgtgatcaatgataccgactataaattggttcaaagccactggcacgcaccttcagagcattttctcgatggacagaggttggcaatggaacttcacatggtacacaaaagtgtagaagggcacttggcagtgattggagttctcttcagagaaggagaaccaaatgctttcatttcgcggatcatggacaagatccataagatcgcagacgtacaagatggagaggtcagcatcggaaagatagatccaagagaatttggatgggatcttacaaagttttatgaatacagaggttctctcacgactcctccttgcacggaagatgtcatgtggaccatcatcaacaaggtggggactgtttcacgtgagcaaattgatgtattgacagatgctcgtcgcggtggttatgagaagaacgcgagaccagctcaacctctgaacggacgtctggtttatttaaacgagcagtccagtccaagtccaactccacggctaagaataccacgagttggtccggtctaagacagtcttataggacaaggcaactccgagccctaatttccatacaaagaaaattcggaaaagaattttgaagatgtatgaaaattgggagccataactatttttttttaactattcttttgattaaaagataaaactacgcaatattatatgcataaagtttttcttttatacatgtattccaataaacaagatgtaataatatccaaccataatgagttgtttgattattttataacacaagatctctcactataca

SEQ ID NO: 1860 - protein, 277 aa, Arabidopsis thaliana
MKTIILFVTFLALSSSSLADETETEFHYKPGEIADPSKWSSIKAEWKICGTGKRQSPINLTPKIARIVHNSTEILQTYYKPVEAILKNRGFDMKVKWEDDAGKIVINDTDYKLVQSHWHAPSEHFLDGQRLAMELHMVHKSVEGHLAVIGVLFREGEPNAFISRIMDKIHKIADVQDGEVSIGKIDPREFGWDLTKFYEYRGSLTTPPCTEDVMWTIINKVGTVSREQIDVLTDARRGGYEKNARPAQPLNGRLVYLNEQSSPSPTPRLRIPRVGPV

SEQ ID NO: 1861 - DNA, 1270 bp, Arabidopsis thaliana
aacgaataagaaaagaagagaaacatcaaacatctttggtttgcttccctcgtacccgttcttcatacaagcacgcctttaattatggattgtcatagaaagacgttcttgttgaagtttttgtgcgtggcatttctgttaaactacagcaatgttggctttgtagacgcagcaacaaacattggcttgaactacggcctccttggagacaacctcccgcctccatctgaagttatcaacctctacaagtccttaagtgttaccaatattcggatcttcgacacaactacggatgtccttaacgcctttcgagggaatcgcaatatcggagttatggtagacgtgaagaaccaagacttagaggctctttcggtcagcgaagaagctgttaacacctggttcgtgaccaacattgagccttacttagctgatgtcaacatcacgttcattgctgtcgggaacgaagtcatcccaggggaaatcggctcttatgtgctacccgtcatgaaatctctcaccaacattgtcaagtcgaggagtctcccgatcttgatcagcaccacggtggctatgaccaaccttggccagtcatatccaccttcggccggagatttcatgcctcaagcacgtgaacaacttaccccggtgctgaagtttttgtctcaaacaaatacgcctatcctcgtcaacatctacccctacttcgcatatgctgctgatcctatcaacattcagctcgactatgccatcttcaacaccaacaaggtcgtggtccaagacgggccacttggttatacaaacatgttcgatgtgatatttgatgcgttcgtatgggcaatggagaaagaaggtgtgaaggatttaccaatggtggtaacagaaactggatggccatctgctggtaacggaaacttaacgactccagatatcgcatctatatacaataccaattttgttaaacatgtggaaagcggtaaagggacgccaaagagaccaaagagtggcattagtggatttctatttgcgacgttcaatgagaatcaaaagccagcgggaaccgaacaaaattttgggttatataatccaacagatatgaagcccatctacaagatgttttgatttttagattcttgattttatagactatcccaaatcattagtaaattaatgatgctctaatagttgtaatagagcgggataaaatcaagatctacaacaacattcattttatatgttgtatgatcttcttaaataaaaaaacttaagaagc

SEQ ID NO: 1862 - protein, 344 aa, Arabidopsis thaliana
MDCHRKTFLLKFLCVAFLLNYSNVGFVDAATNIGLNYGLLGDNLPPPSEVINLYKSLSVTNIRIFDTTTDVLNAFRGNRNIGVMVDVKNQDLEALSVSEEAVNTWFVTNIEPYLADVNITFIAVGNEVIPGEIGSYVLPVMKSLTNIVKSRSLPILISTTVAMTNLGQSYPPSAGDFMPQAREQLTPVLKFLSQTNTPILVNIYPYFAYAADPINIQLDYAIFNTNKVVVQDGPLGYTNMFDVIFDAFVWAMEKEGVKDLPMVVTETGWPSAGNGNLTTPDIASIYNTNFVKHVESGKGTPKRPKSGISGFLFATFNENQKPAGTEQNFGLYNPTDMKPIYKMF

SEQ ID NO: 1863 - DNA, 1650 bp, Arabidopsis thaliana
cctcttccgttgccttttcgctttctccgtacacttggccttccttctagcgatcaaaccctaggtcccgccattgttggtcccagacttcaatcgaagctccaatttcactaatttcaggtgttgtttattctctggaagttggcgatacaatggattctactgctgcaaccaaacgtgttgttgacccacttactgttgggagtgcgtttgtcaatcagtactactacattttctgtaacatgcctgagcatctgccccggttttatcaagagatcagtagagttggccgtgttggacaggacggagtcatgcgtgatttctccacttttcaaggtataagtgaggagcttaagagactgacttatggagattgcaactcggctgagataaccagttatgatactcaagagtctcacaatgggggtttccttctcttcgttactggatacttcactctaaacgagagatcgagaaggaaattcacccaaacttttttccttgccccgcaagaaaagggtttctttgttctgaatgacatcctcagatttgttaatgatgatgctaaggataatgttccagagaccatagatggggaagttgtttctgggataaactctacaacacccactattatcaatggcatgaagggttcggagcaagctgcatgtgtttcagtgaatcctgtttgtaaggaagtgtccaaacccttggataatgagaatgctaaggataatgttctggtacctgagattgctaatgaagttgcaaggactgagataacttgcaaagaagttgcagatgattcacagaaaaattatgaccctgatgatggacttgcagatgctcccaagaaatcctatgcctctgtgttgaaggttacgaaagataaatttggagttccagctgtctctttaccttctccaaagaagatacctaaagaccaagaacatcaagcgccttcagatccttctacaggccagatactcaaagaccaaggtcaacaagcatcttcagatccttctcaagtgatagaatctgatacagtttctgagtctgttgatgcttctgaaaatgggcacaatcaggaagcggtagctgagggtacatctatttatgtgagacatcttccttttaatgccaacattgacatgcttgaggctgaatttaagcaatttggagctattaccaatggtgggattcaagtcataaatcaaaggggccttggttatccttatggttttgttgagtttgaggaggcagatgctgcccacagagcaatagaggcttcacctgtgaagattggtggactgagagcttttgtggaggagaagctatcgacatcaagaggtaaaagaggaaatggaaacgtgggatacggaaataggaatgtgggagtgggaatgagaggaagaggaagttatggatatggctatgattacaggaggggaggtcgaggtcctggaggaggaggaaggtcttttaaccgtagaggcaatgaatacgtcgccagcatcaactcgtactagagcggatttgggttctcttgtggcggataattgatttttggaatggtggaaagaagatggtagcaagacagacagaattggtagatatctctctctcgggtattcaaatattagtaaaagg

SEQ ID NO: 1864 - protein, 458 aa, Arabidopsis thaliana
MDSTAATKRVVDPLTVGSAFVNQYYYIFCNMPEHLPRFYQEISRVGRVGQDGVMRDFSTFQGISEELKRLTYGDCNSAEITSYDTQESHNGGFLLFVTGYFTLNERSRRKFTQTFFLAPQEKGFFVLNDILRFVNDDAKDNVPETIDGEVVSGINSTTPTIINGMKGSEQAACVSVNPVCKEVSKPLDNENAKDNVLVPEIANEVARTEITCKEVADDSQKNYDPDDGLADAPKKSYASVLKVTKDKFGVPAVSLPSPKKIPKDQEHQAPSDPSTGQILKDQGQQASSDPSQVIESDTVSESVDASENGHNQEAVAEGTSIYVRHLPFNANIDMLEAEFKQFGAITNGGIQVINQRGLGYPYGFVEFEEADAAHRAIEASPVKIGGLRAFVEEKLSTSRGKRGNGNVGYGNRNVGVGMRGRGSYGYGYDYRRGGRGPGGGGRSFNRRGNEYVASINSY

SEQ ID NO: 1865 - DNA, 904 bp, Arabidopsis thaliana
aatttttacacacagagtagagcagagagagagagagagagagagatgggtgattctgacgtcggtgatcgtcttccccctccatcttcttccgacgaactctcgagctttctccgacagattctttcccgtactcctacagctcaaccttcttcaccaccgaagagtactaatgtttcctccgctgagaccttcttcccttccgtttccggcggagctgtttcttccgtcggttatggagtctctgaaactggccaagacaaatatgctttcgaacacaagagaagtggagctaaacagagaaattcgttgaagagaaacattgatgctcaattccacaacttgtctgaaaagaagaggaggagcaagatcaacgagaaaatgaaagctttgcagaaactcattcccaattccaacaagactgataaagcctcaatgcttgatgaagctatagaatatctgaagcagcttcaacttcaagtccagactttagccgttatgaatggtttaggcttaaaccctatgcgattaccacaggttccacctccaactcatacaaggatcaatgagaccttagagcaagacctgaacctagagactcttctcgctgctcctcactcgctggaaccagctaaaacaagtcaaggaatgtgcttttccacagccactctgctttgaagataacattcagacaatgatgatgatcggaattcctctagtacctgccagacaggagtgaacaatgttttgagttttagcattggccagatttctatgttcagttatagttatgctaataagctttaggagtgaacaaaatctgagtagtttgattataatgatgtctgaagcagattatatataaaagactaatttacttacatatgagatgattattacaact

SEQ ID NO: 1866 - protein, 210 aa, Arabidopsis thaliana
MGDSDVGDRLPPPSSSDELSSFLRQILSRTPTAQPSSPPKSTNVSSAETFFPSVSGGAVSSVGYGVSETGQDKYAFEHKRSGAKQRNSLKRNIDAQFHNLSEKKRRSKINEKMKALQKLIPNSNKTDKASMLDEAIEYLKQLQLQVQTLAVMNGLGLNPMRLPQVPPPTHTRINETLEQDLNLETLLAAPHSLEPAKTSQGMCFSTATLL

SEQ ID NO: 1867 - DNA, 922 bp, Arabidopsis thaliana
gcttttttataatgccaactttgtacaaaaaagcaggcttcacaatggcgtctgggcgtgaagagttcgtatacatggctaagctcgcggagcaagcggagaggtacgaagagatggtagagtttatggagaaagtctccgccgccgttgatggcgatgaactcaccgtagaagagcgaaatcttctctccgtcgcttataagaatgtgattggtgctcgccgtgcctcgtggcgtatcatttcatcgatcgagcagaaggaagagagccgtggtaacgatgaccacgtcacggcgatccgtgaatataggtctaagatcgagacggaactctccggaatctgcgacggaatccttaagttgcttgactctagactcatccctgccgctgcttctggtgattccaaggtcttttaccttaagatgaagggagattatcacaggtacttggctgagtttaagactggtcaagagaggaaagacgccgccgaacatacactcgccgcttacaaatctgctcaggatattgctaatgcagagcttgctccaacacacccaattcgtcttggtcttgcattgaacttctctgtgttctattacgagatcctcaattctcctgatcgtgcctgtaacctcgccaaacaggcctttgatgaggcgattgcagagttggacactcttggtgaagagtcatacaaagacagtaccttgatcatgcagcttcttcgtgacaatctcactctctggacatctgatatgcaggatgatgctgcggatgagatcaaggaagcagcagcgccaaaaccgaccgaggaacagcagtgatctttgacccagctttcttgtacaaagttggcattataagaaagcattgcttatcaatttgttgcaacgaacaggtcactatcagtcaaaataaaatc

SEQ ID NO: 1868 - protein, 270 aa, Arabidopsis thaliana
MPTLYKKAGFTMASGREEFVYMAKLAEQAERYEEMVEFMEKVSAAVDGDELTVEERNLLSVAYKNVIGARRASWRIISSIEQKEESRGNDDHVTAIREYRSKIETELSGICDGILKLLDSRLIPAAASGDSKVFYLKMKGDYHRYLAEFKTGQERKDAAEHTLAAYKSAQDIANAELAPTHPIRLGLALNFSVFYYEILNSPDRACNLAKQAFDEAIAELDTLGEESYKDSTLIMQLLRDNLTLWTSDMQDDAADEIKEAAAPKPTEEQQ

SEQ ID NO: 1869 - DNA, 2037 bp, Arabidopsis thaliana
gtgcacaattgatgagcaatgcttttttataatgccaactttgtacaaaaaagcaggcttaaacaatgactgattaccggctacaaccaacgatgaatctttggaccaccgacgacaacgcttctatgatggaagctttcatgagctcttccgatatctcaactttatggcctccggcgtcgacgacaaccacgacggcgacgactgaaacaactccgacgccggcgatggagattccggcacaggcgggatttaatcaagagactcttcagcaacgtttacaagctttgattgaaggaacacacgaaggttggacctacgctatattctggcaaccgtcgtatgatttctccggcgcctccgtgctcggatggggagatggttattacaaaggtgaagaagataaagcaaacccgagacggagatcgagttcgccgccgttttctactccggcggatcaggagtacaggaaaaaagtgttgagagagcttaactcgttgatctccggtggtgttgctccgtcggatgacgctgttgatgaggaggtgacggatacggaatggtttttcttggtttcgatgacgcagagcttcgcttgcggtgcgggattagctggtaaagcgtttgcaacgggtaacgcggtttgggtttccgggtcagatcaattatccgggtcgggttgtgaacgggctaagcaaggaggagtgtttgggatgcatactattgcgtgtattccttcggcgaacggagttgtggaagtcgggtcaacggagccgatccgacagagttcggaccttattaacaaggttcgaattcttttcaatttcgacggcggagctggagatttatcgggtcttaattggaatcttgacccggatcaaggtgagaacgacccgtctatgtggattaatgacccgattggaacacctggatctaacgaaccgggtaacggagctccaagttctagctcccagcttttttcaaagtctattcagtttgagaacggtagctcaagcacaataaccgaaaacccgaatctggatccgactccgagtccggttcattctcagacccagaatccgaaattcaataacactttctcccgagaacttaatttttcgacgtcaagttctactttagtgaaaccaagatccggcgagatattaaacttcggcgatgaaggtaaacgaagctccggaaacccggatccaagttcttattcgggtcaaacacaattcgaaaacaaaagaaagaggtcgatggttttgaacgaagataaagttctatcattcggagataaaaccgccggagaatcagatcactccgatctagaagcttccgtcgtgaaagaagtagcagtagagaaacgtccaaagaaacgaggaagaaagccagcaaacggtagagaagagccactaaaccacgtcgaagcagagagacaaagacgcgagaaactaaaccaaagattctacgcgttacgagcggttgtaccaaacgtttcaaaaatggataaagcttcgttactcggtgacgcaatcgcttacatcaacgagcttaaatccaaagtagtcaaaacagagtcagagaaactccaaatcaagaaccagctcgaggaagtgaaactcgagctcgccggaagaaaagcgagtgctagtggaggagatatgtcgtcttcgtgttcttcgattaaaccggtggggatggagattgaagtgaagataattggttgggacgcaatgattagagttgaatctagtaagaggaatcatccggcggcgaggttgatgtcggcgttgatggatttggagttggaagtgaatcacgcgagtatgtcggtggttaacgatttgatgattcaacaagcgacggtgaagatgggttttaggatctatacgcaagaacagctcagagcaagtttgatttcaaaaatcggttaaaagggtgtacccagctttcttgtacaaagtggcattataagaaagcattgcttatcaatttgttgcaacgaaaggtcacatcatcaataaatctactgac

SEQ ID NO: 1870 - protein, 623 aa, Arabidopsis thaliana
MTDYRLQPTMNLWTTDDNASMMEAFMSSSDISTLWPPASTTTTTATTETTPTPAMEIPAQAGFNQETLQQRLQALIEGTHEGWTYAIFWQPSYDFSGASVLGWGDGYYKGEEDKANPRRRSSSPPFSTPADQEYRKKVLRELNSLISGGVAPSDDAVDEEVTDTEWFFLVSMTQSFACGAGLAGKAFATGNAVWVSGSDQLSGSGCERAKQGGVFGMHTIACIPSANGVVEVGSTEPIRQSSDLINKVRILFNFDGGAGDLSGLNWNLDPDQGENDPSMWINDPIGTPGSNEPGNGAPSSSSQLFSKSIQFENGSSSTITENPNLDPTPSPVHSQTQNPKFNNTFSRELNFSTSSSTLVKPRSGEILNFGDEGKRSSGNPDPSSYSGQTQFENKRKRSMVLNEDKVLSFGDKTAGESDHSDLEASVVKEVAVEKRPKKRGRKPANGREEPLNHVEAERQRREKLNQRFYALRAVVPNVSKMDKASLLGDAIAYINELKSKVVKTESEKLQIKNQLEEVKLELAGRKASASGGDMSSSCSSIKPVGMEIEVKIIGWDAMIRVESSKRNHPAARLMSALMDLELEVNHASMSVVNDLMIQQATVKMGFRIYTQEQLRASLISKIG

SEQ ID NO: 1871 - DNA, 1436 bp, Oryza sativa
attttggctgatagtgacctgttcgttgcaacaaattgatgagcaatgcttttttataatgccaactttgtacaaaaaagcaggcttaaacaatgggttcagtaggggttgcgccgtctgggttaaagaacagcagtagcaccagcatgggtgctgagaagttgcctgatcagatgcatgatctgaagataagggacgataaggaagttgaagcgactattattaacggcaagggaacagaaaccggccacataattgtcacaactactggtggcagaaatggtcagccgaaacagacagttagctacatggctgagcgtattgtagggcaaggttcatttgggattgtcttccaggcaaaatgtctggagacaggtgagacagttgctatcaagaaggttcttcaggataagcgctacaagaaccgtgagcttcagaccatgcgccttcttgaccacccaaatgttgtagctctgaagcactgtttcttctctacaactgagaaggatgaactgtatctaaacttggttcttgagtatgtgcctgaaactgttcatcgtgttgtgaagcattacaacaagatgaaccagcgtatgccacttatctatgtgaagctgtatatgtaccagatttgtagggcattagcttacatccataatagcatcggagtttgccacagagatatcaagccacagaatcttctggtaaacccacatacccatcaactcaagctatgtgactttgggagtgcaaaagttctggtcaagggagaaccgaacatatcgtacatttgctcccgatactatagggctccggagctcatatttggtgccaccgaatacactacagctattgacatctggtctgctggatgtgttcttgctgaacttatgttagggcagcctctgtttcctggtgaaagtggtgtagaccaacttgtggaaatcatcaaggtccttggaacacctacaagggaggaaattaaatgcatgaatccaaactataccgagttcaagtttccacagattaaagcacacccatggcacaaggtattccataaaaggttgcctccagaagctgttgatcttgtctctaggctgctccagtactcacccaacctaagatgcactgctgtggaagcacttgttcacccattctttgatgagcttcgagaccctaatgctcgccttccgaatggccgctttttgcctcctctcttcaacttcaagcctcatgaactgaaaggaatcccatcagatattatggcgaaattgatcccagaacatgtgaagaagcaatgctcctatgcaggagtatgagacagcttcacccagctttcttgtacaaagttggcattataagaaagcattgcttatcaatttgttgcaacgaacaggtcactatcagtcaaaataaaatcatttttgccaccagca

SEQ ID NO: 1872 - protein, 408 aa, Oryza sativa
MGSVGVAPSGLKNSSSTSMGAEKLPDQMHDLKIRDDKEVEATIINGKGTETGHIIVTTTGGRNGQPKQTVSYMAERIVGQGSFGIVFQAKCLETGETVAIKKVLQDKRYKNRELQTMRLLDHPNVVALKHCFFSTTEKDELYLNLVLEYVPETVHRVVKHYNKMNQRMPLIYVKLYMYQICRALAYIHNSIGVCHRDIKPQNLLVNPHTHQLKLCDFGSAKVLVKGEPNISYICSRYYRAPELIFGATEYTTAIDIWSAGCVLAELMLGQPLFPGESGVDQLVEIIKVLGTPTREEIKCMNPNYTEFKFPQIKAHPWHKVFHKRLPPEAVDLVSRLLQYSPNLRCTAVEALVHPFFDELRDPNARLPNGRFLPPLFNFKPHELKGIPSDIMAKLIPEHVKKQCSYAGV

SEQ ID NO: 1873 - DNA, 919 bp, Oryza sativa
gccaactttgtacaaaaaagcaggcttaaacaatggggcgggggaaggtgcagctgaagcggatagagaacaagatcaacaggcaggtgacgttctccaagaggaggaatggattgctgaagaaggcgcacgagatctccgtcctctgcgacgccgaggtcgccgccatcgtcttctcccccaagggcaagctctacgagtacgccactgactccaggatggacaaaatccttgaacgttatgagcgctattcatatgctgaaaaggctcttatttcagctgaatccgagagtgagggaaattggtgccatgaatacaggaaacttaaggcaaagattgagaccatacaaaaatgtcacaaacacctcatgggagaggatctagaatccctgaatctcaaagaactccaacagctagagcagcagctggagagttcattgaagcacataatatcaagaaagagccaccttatgcttgagtccatttccgagctgcagaaaaaggagaggtcactgcaggaggagaacaaggctctgcagaaggaactggtggagaggcagaagaatgtgaggggccagcagcaagtagggcagtgggaccaaacccaggtccaggcccaggcccaagcccaaccccaagcccagacaagctcctcctcctcctccatgctgagggatcagcaggcacttcttccaccacaaaatatctgctacccgccggtgatgatgggcgagagaaatgatgcggcggcggcggcggcggtggcggcgcagggccaggtgcaactccgcatcggaggtcttccgccatggatgctgagccacctcaatgcttaagatgatcatcgtcgtcgtcgtcggccaaaccagctttcttgtacaaagttggcattataagaaagcattgcttatcaatttgt

SEQ ID NO: 1874 - protein, 267 aa, Oryza sativa
MGRGKVQLKRIENKINRQVTFSKRRNGLLKKAHEISVLCDAEVAAIVFSPKGKLYEYATDSRMDKILERYERYSYAEKALISAESESEGNWCHEYRKLKAKIETIQKCHKHLMGEDLESLNLKELQQLEQQLESSLKHIISRKSHLMLESISELQKKERSLQEENKALQKELVERQKNVRGQQQVGQWDQTQVQAQAQAQPQAQTSSSSSSMLRDQQALLPPQNICYPPVMMGERNDAAAAAAVAAQGQVQLRIGGLPPWMLSHLNA

SEQ ID NO: 1875 - DNA, 1799 bp, Arabidopsis thaliana
tttgtacaaaaaagcaggcttaaacaatggctccgacgaatgttcaagtaaccgattaccatctcaaccaatcaaaaacggatacaacaaatctctggtcaaccgacgacgatgcatcggtaatggaagctttcatcggcggcggctccgatcattcttctctttttcctccacttcctcctcctcctcttcctcaagtcaacgaagataatctccagcaacgtctccaagctttaatcgaaggagcaaacgagaactggacttacgccgtgttctggcaatcatctcacggtttcgccggagaagacaacaacaacaacaacacagtgttgttaggttggggagatggttattacaaaggagaagaagagaagtctagaaagaagaaatcaaatccagctagtgcagctgaacaagagcatcgtaagagagtgattagagagctcaactctttaatctccggtggtgtaggaggaggagatgaagctggagatgaagaagttacagatactgaatggttcttcttagtttcaatgacacagagctttgtcaagggtactggtttacctggtcaagctttctcaaattcagacacgatttggttatctggttctaatgctttagctggatcaagttgtgagagagctcgtcaaggtcagatttatgggttacaaacaatggtgtgtgtagcgacagagaatggtgtcgttgagcttggttcgtcggagattattcatcaaagttcagatcttgttgataaagttgacacctttttcaattttaacaatggtggtggtgaatttggttcttgggcgtttaatttgaatccagatcaaggagagaatgatccaggtttgtggattagtgaacctaatggtgttgactctggtcttgtagctgctccggtgatgaataatggtggaaatgactcaacttctaattctgattctcaaccaatttctaagctttgtaatggaagctctgttgaaaaccctaaccctaaagttctgaaatcttgtgaaatggtgaatttcaagaatgggattgagaatggtcaagaagaagatagtagtaataagaagagatcaccggtttcgaataatgaagaagggatgctttcttttacctctgttcttccatgtgactcgaatcactctgatcttgaagcttcagtggctaaagaagctgagagtaacagagttgtggttgaaccggagaagaaaccgaggaaacgagggagaaaaccggcgaatggaagagaagagcctttgaatcatgtagaggcagagagacagagaagagagaagttgaatcagagattctattctttaagagctgtggttcctaatgtgtctaagatggataaagcttctctattaggagatgctatttcgtatatcagtgagcttaagtctaagttgcaaaaggctgaatctgataaagaagagttgcagaagcagattgatgtgatgaataaagaagcgggaaatgcgaaaagttcggtaaaagatcgaaaatgtttgaatcaagaatcgagtgtgttgatagagatggaggttgatgtgaagattattggttgggatgcaatgataaggattcaatgtagtaagaggaatcatcctggtgctaagttcatggaagcacttaaggagttggatttggaagtgaatcatgcgagtttatcggtagtgaatgatcttatgatccaacaagcgactgtgaaaatggggaatcagtttttcacgcaagatcaactcaaggttgctctaacggagaaagttggagaatgtccatgaatt

SEQ ID NO: 1876 - protein, 589 aa, Arabidopsis thaliana
MAPTNVQVTDYHLNQSKTDTTNLWSTDDDASVMEAFIGGGSDHSSLFPPLPPPPLPQVNEDNLQQRLQALIEGANENWTYAVFWQSSHGFAGEDNNNNNTVLLGWGDGYYKGEEEKSRKKKSNPASAAEQEHRKRVIRELNSLISGGVGGGDEAGDEEVTDTEWFFLVSMTQSFVKGTGLPGQAFSNSDTIWLSGSNALAGSSCERARQGQIYGLQTMVCVATENGVVELGSSEIIHQSSDLVDKVDTFFNFNNGGGEFGSWAFNLNPDQGENDPGLWISEPNGVDSGLVAAPVMNNGGNDSTSNSDSQPISKLCNGSSVENPNPKVLKSCEMVNFKNGIENGQEEDSSNKKRSPVSNNEEGMLSFTSVLPCDSNHSDLEASVAKEAESNRVVVEPEKKPRKRGRKPANGREEPLNHVEAERQRREKLNQRFYSLRAVVPNVSKMDKASLLGDAISYISELKSKLQKAESDKEELQKQIDVMNKEAGNAKSSVKDRKCLNQESSVLIEMEVDVKIIGWDAMIRIQCSKRNHPGAKFMEALKELDLEVNHASLSVVNDLMIQQATVKMGNQFFTQDQLKVALTEKVGECP

SEQ ID NO: 1877 - DNA, 1128 bp, Chlamydomonas reinhardtii
tgactgttcgttgcacaaattgatgagcaatgcttttttataatgccaactttgtacaaaaaagcaggcttaaacaatgcgctcagccgttctacaacgcggccaggcgcggcgagtgtcttgccgggttcgggcggatggttcgggcgtggattcgctgccctcgaccagcgccagcagcagcgcacgccctctcattgatcgccgtcagctcctgaccggtgctgctgcgtcggtcataaccttcgttggctgcccttgccccctgtgcaagcctggggaggcaaaggccgcagcttggaactatggcgaagttgcgggtccgccaacctggaagggtgtgtgtgcgacgggcaagcgccagtcgcccatcaacatcccgttgaacacatcggcgccgaaggtcgacgcggagatgggcgaattcgatttcgcctacggcagcttcgagaagtgcgacgtgctgaacacgggacacagcaccatgcaggtgaacttccccgctggcaacctggcgttcattggcaacatggagctggagctgctgcagttccacttccacgcgccctcggagcacgccatggatggccgccgttacgccatggaggcgcatctggtgcacaagaataaaagcaccggcaacctagctgtgctgggcattatgctggagcccggcggcctgatcaagaacccggcgctgtccactgctctggaggtggcgcccgaggtgcccctggccaagaagccctcgcccaagggcatcaaccccgtcatgctgctgcccaagaagagcaaggccgggacacggccgttcgtgcactaccctggctcgcttaccacgcccccgtgttcggagggggtggactggtttgtgttcatgcagcccatcaaggtgcccgacagccagatcctggacttcatgcgcttcgtgggcgacaacaagacatacgccaccaacacgcggccactgcagctgctcaacagccgcctggtcgaatacgagctgtgagcggacacgagtgtgctagggtcagtgagacccagctttcttgtacaaagttggcattataagaaagcattgcttatcaatttgttgcaacgaacaggtcactatcagtcaaaataaat

SEQ ID NO: 1878 - protein, 310 aa, Chlamydomonas reinhardtii
MRSAVLQRGQARRVSCRVRADGSGVDSLPSTSASSSARPLIDRRQLLTGAAASVITFVGCPCPLCKPGEAKAAAWNYGEVAGPPTWKGVCATGKRQSPINIPLNTSAPKVDAEMGEFDFAYGSFEKCDVLNTGHGTMQVNFPAGNLAFIGNMELELLQFHFHAPSEHAMDGRRYAMEAHLVHKNKSTGNLAVLGIMLEPGGLIKNPALSTALEVAPEVPLAKKPSPKGINPVMLLPKKSKAGTRPFVHYPGSLTTPPCSEGVDWFVFMQPIKVPDSQILDFMRFVGDNKTYATNTRPLQLLNSRLVEYEL

SEQ ID NO: 1879 - DNA, 1001 bp, Arabidopsis thaliana
tttgtacaaaaaagcaggcttaaacaatggcgactcttaaggtttctgattctgttcctgctccttctgatgatgctgagcaattgagaaccgcttttgaaggatggggtacgaacgaggacttgatcatatcaatcttggctcacagaagtgctgaacagaggaaagtcatcaggcaagcataccacgaaacctacggcgaagaccttctcaagactcttgacaaggagctctctaacgatttcgagagagctatcttgttgtggactcttgaacccggtgagcgtgatgctttattggctaatgaagctacaaaaagatggacttcaagcaaccaagttcttatggaagttgcttgcacaaggacatcaacgcagctgcttcacgctaggcaagcttaccatgctcgctacaagaagtctcttgaagaggacgttgctcaccacactaccggtgacttcagaaagcttttggtttctcttgttacctcatacaggtacgaaggagatgaagtgaacatgacattggctaagcaagaagctaagctggtccatgagaaaatcaaggacaagcactacaatgatgaggatgttattagaatcttgtccacaagaagcaaagctcagatcaatgctacttttaaccgttaccaagatgatcatggcgaggaaattctcaagagtcttgaggaaggagatgatgatgacaagttccttgcacttttgaggtcaaccattcagtgcttgacaagaccagagctttactttgtcgatgttcttcgttcagcaatcaacaaaactggaactgatgaaggagcactcactagaattgtgaccacaagagctgagattgacttgaaggtcattggagaggagtaccagcgcaggaacagcattcctttggagaaagctattaccaaagacactcgtggagattacgagaagatgctcgtcgcacttctcggtgaagatgatgcttaaacccagctttcttgtacaaag

SEQ ID NO: 1880 - protein, 317 aa, Arabidopsis thaliana
MATLKVSDSVPAPSDDAEQLRTAFEGWGTNEDLIISILAHRSAEQRKVIRQAYHETYGEDLLKTLDKELSNDFERAILLWTLEPGERDALLANEATKRWTSSNQVLMEVACTRTSTQLLHARQAYHARYKKSLEEDVAHHTTGDFRKLLVSLVTSYRYEGDEVNMTLAKQEAKLVHEKIKDKHYNDEDVIRILSTRSKAQINATFNRYQDDHGEEILKSLEEGDDDDKFLALLRSTIQCLTRPELYFVDVLRSAINKTGTDEGALTRIVTTRAEIDLKVIGEEYQRRNSIPLEKAITKDTRGDYEKMLVALLGEDDA

SEQ ID NO: 1881 - DNA, 1515 bp, Oryza sativa
gtacaaaaaagcaggcttaaacaatggcagtgcaagctggaaccccagctactcctataagcccccaagtgattagtggtgcatttgttcagcaatattaccacattctacatgagacaccagatcaggtctataagttctatcaagatgcaagtattgttggtcggcctgattctaatggagtcatgaaatatgtatcaacaactgctgatatcaacaaaacaatcttgtctatggacttcagcaactacttaacagagatagagactgcagatgcacagttatctcaccaggatggtgtgctcattgttgttactggatctttgacatctgaaggcatatgccgtagatttacacagtcattcttccttgcaccacaagaatctggtggctatgttgttctcaatgatatttttagatttatagtggaaaggccaccagttgcaataagtcaagttagtcaagaaaatgagaacaatcagaacactgccactcttcctgaaactgatcctaatccagcgggagatggtatgatctcagagcctgtggcagtggaaaataatgttgcggagggggaagtgacaaattccacggttgatggcactagtattgaaaataatgctactgctgctgtcgaaccacctgtacaaatgacgaaagaggagcccaggaagatctctgttgctgctcctccccctccagctcagaaggatgtaacgaagaagtcctatgcgtcgattgtgaaggttatgaaggaggtgtcactaaccccagttgtcaaacctaagccagctccaaaacatgtggttaagactgttgaagcttcagagaaaccttctgttaaaagttctcaaactgttgaaatcactccgaatgataacaacgatgctgaaaataacacttctaatgatgagcaaggttactcagtttttgtgaagagtttgcctcacaatgtgacagtccagacggttgaggaagagttcaagaaatttggcgctatcaagccaggtggcatccaagttaggaacaacaagattgaccggttctgctttggttttattgagtttgagtcccagcaatctatgcaggcagcaattgaggcatctccgattcatatgggtgggaaagaagtatttgttgaggagaaaagaaccactacccgagttgtgaatggtgttgtcatcacgcgtggtgataatgggaatgctggtggaggcggacgttaccaatctggaaggggaggctaccgcggtgataatttcaggggacggggtggtggctatgcgaacagcggaaactaccgtggaggtgataacttcagcaggaggaacgacttgagaaatcgcaacgagttttcaggtcgtggtcgagggccaccgcctgggaatggctatcagaacaacggattccatccagcaaggccgttccagaacggaaatgggaggttcacccgagtcaacggccctaggcaaacaccggttgcggcatagaggagggcaatgatgacccagcttt

SEQ ID NO: 1882 - protein, 488 aa, Oryza sativa
MAVQAGTPATPISPQVISGAFVQQYYHILHETPDQVYKFYQDASIVGRPDSNGVMKYVSTTADINKTILSMDFSNYLTEIETADAQLSHQDGVLIVVTGSLTSEGICRRFTQSFFLAPQESGGYVVLNDIFRFIVERPPVAISQVSQENENNQNTATLPETDPNPAGDGMISEPVAVENNVAEGEVTNSTVDGTSIENNATAAVEPPVQMTKEEPRKISVAAPPPPAQKDVTKKSYASIVKVMKEVSLTPVVKPKPAPKHVVKTVEASEKPSVKSSQTVEITPNDNNDAENNTSNDEQGYSVFVKSLPHNVTVQTVEEEFKKFGAIKPGGIQVRNNKIDRFCFGFIEFESQQSMQAAIEASPIHMGGKEVFVEEKRTTTRVVNGVVITRGDNGNAGGGGRYQSGRGGYRGDNFRGRGGGYANSGNYRGGDNFSRRNDLRNRNEFSGRGRGPPPGNGYQNNGFHPARPFQNGNGRFTRVNGPRQTPVAA

SEQ ID NO: 1883 - DNA, 3146 bp, Synechocystis sp.
tacaaaaaagcaggcttaaacaatgaacttggcagttcctgcattcggtctttccactaactggtctggtaatggcaatggttccaactctgaagaagagtcggtgctttaccagcggttaaagatggtggaggaattgtgggaaagggtgctccaaagcgaatgtggccaggaattggtggatttgctgacggaattaaggcttcagggtacccatgaggcgatcaccagcgaaatttccgaagaagtcatcatgggtattacccagcgcattgagcatttagaactcaatgatgccatccgggcggctcgggcctttgccctatatttccagttgatcaacatcgttgaacagcactacgaacaaaacgagcaacaacggaatcgttgggaagcttcccaggaaaccaacttctatgagcaggcgggcaatgaggaagaaatggtccccccatcccgattaggcgcgtcaacggaaccattgccagtgggcattgaccagaatgaattgcaagcttctgtaggtacgttccattggttaatgagggagctaaaacgcctcaatgtgcccccccaacatatccaaaatttattggatcatctggacattcgcctggtgatcaccgctcaccccacggaaattgtccgtcacaccatccggcgcaaacaaagaagggtggaccgcattcttcgtaaactagatcaactccagggttctgtgaccggtcgggactggctcaacacctgggatgcaaaaacggcgatcgcccaattaacggaggaaattcgcttttggtggcgtaccgacgaacttcatcagttcaaacccactgtgttggacgaagtggactattccctccattattttgatgaagtactgttcgacgctgtaccggaattgtccaaacggttaggacaagctattaaagaaacctttccccatctgcgggccccccgggctaatttttgttattttggctcctgggtcggtggcgatcgggacggcaacccttcggtaaccccagaagtgacctggcagacggcctgttaccagcggggtttagtgctggggaaatatttgtttagtttgggggaactggtggccattcttagcccttccctccattggtgcaaagtctcccaggaattgttggactctttggaacgggaccgcattcaattaccggaaatttacgaagaactttctctccgctatcgccaggaaccctatcggatgaagctggcctacgttaccaaacggctggaaaacaccctgcggcgtaataatcgtctagccaacccagaagaacggcaaacgatgatcaccatgccggccgaaaatcactatcgcactggggaagaattattagaggaattaagactcattcagcgtaatctgaccgaaactggtttaacctgcctggagttggaaaatttgattacccagttggaagtctatggctttaacctagcccagttggattttcgccaggaatcttcccgccacgccgaggcgatcgccgaaattgctgagtatatgggggtactcaccactccctacgaagaaatggccgaagaagataaattagcctggttaggggtagaactgcaaacccgccgtcctttaattccccaggaaatgcccttttcggagcggactagggaaaccattgaaaccctccgcaccctgcgccatctacaaatggaatttggggtggatatttgccaaacctacatcatcagcatgaccaacgatgccagtgatgtgttggaagtattgctgttagccaaggaagccggattgtatgacccggccaccgcctccaattccctccgcattgtgcccctgtttgaaacagtagaagatctcaaaaacgctccggggattatggattctcttttcagcttgcctttttaccgggctacattggcgggcagttaccattccttaaaagagttgcaaaatcagccaccggattattaccaaattcccaccaccacagccctactaaatcccggcaatctccaggaaattatggtgggctattccgacagcaataaagactccggctttttgagcagtaactgggaaattcataaggcccaaaaatcactgcaggcagtggcccaaagccatcgggtaattctccggctgttccacggtcgaggaggatctgttggccgggggggcggcccggcctataaagccattttggcccagcccgcaggcaccgtggacggtcggatcaaaattaccgaacaaggggaagtgttagcttctaaatattccctgccagagttggccctctacaacctggaaactttaaccacggcggtcatccaagctagtttacttaaaagtagttttgatttcattgagccctggaaccggattatggaggagttggcctgcactgcccgtcgagcctaccggagtttgatttacgaagaaccggactttttagatttcttcctgacggttacccccattcctgaaattagcgagttacagattagttcccgccctgcccgacgtaaggggggtaaagcggatctcagcagtttgcgggccattccctgggtgttcagttggacccaaacccgtttcctgctgccggcttggtatggggtgggcacggcgttgaaatcctttgtggaccaagacccggtcaaaaatatgaagttgttgcgttacttctatttcaaatggcctttcttcaacatggtgatctcgaaggtggaaatgaccctttccaaggtggacctcaccatcgcttcccactatgtgcaagagctatctaagccagaagaccgggaacgattcgatcgcctttttcagcagatcaagcaagagtatcaattaaccagggactttgccatggaaattacggcccatccccacctcctggacggcgatcgctctttgcaacggtcggtactcctacgaaatcgtactattgttcccctggggctactgcagatttccctgctgaaacgtttacgccaagtaacccaggaagcggagaccagcggcgtgcgttaccgtcgttattccaaagaagaactactgcggggagctctgttaaccattaacggtattgcggccggaatgcgtaatactggttgaacccagctttcttgtacaa

SEQ ID NO: 1884 - protein, 1034 aa, Synechocystis sp.
MNLAVPAFGLSTNWSGNGNGSNSEEESVLYQRLKMVEELWERVLQSECGQELVDLLTELRLQGTHEAITSEISEEVIMGITQRIEHLELNDAIRAARAFALYFQLINIVEQHYEQNEQQRNRWEASQETNFYEQAGNEEEMVPPSRLGASTEPLPVGIDQNELQASVGTFHWLMRELKRLNVPPQHIQNLLDHLDIRLVITAHPTEIVRHTIRRKQRRVDRILRKLDQLQGSVTGRDWLNTWDAKTAIAQLTEEIRFWWRTDELHQFKPTVLDEVDYSLHYFDEVLFDAVPELSKRLGQAIKETFPHLRAPRANFCYFGSWVGGDRDGNPSVTPEVTWQTACYQRGLVLGKYLFSLGELVAILSPSLHWCKVSQELLDSLERDRIQLPEIYEELSLRYRQEPYRMKLAYVTKRLENTLRRNNRLANPEERQTMITMPAENHYRTGEELLEELRLIQRNLTETGLTCLELENLITQLEVYGFNLAQLDFRQESSRHAEAIAEIAEYMGVLTTPYEEMAEEDKLAWLGVELQTRRPLIPQEMPFSERTRETIETLRTLRHLQMEFGVDICQTYIISMTNDASDVLEVLLLAKEAGLYDPATASNSLRIVPLFETVEDLKNAPGIMDSLFSLPFYRATLAGSYHSLKELQNQPPDYYQIPTTTALLNPGNLQEIMVGYSDSNKDSGFLSSNWEIHKAQKSLQAVAQSHRVILRLFHGRGGSVGRGGGPAYKAILAQPAGTVDGRIKITEQGEVLASKYSLPELALYNLETLTTAVIQASLLKSSFDFIEPWNRIMEELACTARRAYRSLIYEEPDFLDFFLTVTPIPEISELQISSRPARRKGGKADLSSLRAIPWVFSWTQTRFLLPAWYGVGTALKSFVDQDPVKNMKLLRYFYFKWPFFNMVISKVEMTLSKVDLTIASHYVQELSKPEDRERFDRLFQQIKQEYQLTRDFAMEITAHPHLLDGDRSLQRSVLLRNRTIVPLGLLQISLLKRLRQVTQEAETSGVRYRRYSKEELLRGALLTINGIAAGMRNTG

SEQ ID NO: 1885 - DNA, 1028 bp, Arabidopsis thaliana
tttgtacaaaaaagcaggcttaaacaatgggattttgtttttgtttatcctcaggaggatcaacagataaaagtcagatttatgagataactgattatggacaagaaaatgcagttttatactctgaccaccatgttgtttctcaaaacttgggctctgtctcttctttagccggaggcaagggcttgaaccaagatgctgccattctccacctgggatatggaacagaagaaggagcgttatgtggagtgtttgatgggcatggaccgagaggtgcgtttgtgagcaagaacgtaaggaaccaattgccatctatactcttaggccacatgaataatcattcagtgactcgagactggaaactcatatgcgaaacatcgtgtttggagatggacaaaaggattcttaaagttaaaaagattcatgattgctctgcttctggaactactgctgttctcgccgttaaacatggaaatcaagtgatggtggcaaatcttggggattcaagggctgtcatgattggaacaagtgaggatggagaaaccaaggtggctcagttgaccaatgacctgaagccaagtgtcccaagcgaagcggagagaataaggaaaagaaacggaagggtgttagctttggagtcggaacctcacattctgagagtttggcttccaaccgaaaaccgaccaggcctagccatgtcgcgggcttttggtgatttcctccttaaaagctacggtgtcattgcgactccgcaagtctctacgcatcaaatcacttccagcgaccaatttctactccttgcttcagacggggtgtgggatgtacttagtaacgaggaagtggcaacggtggtgatgaagtcagcaagtgaggcaggagcggccaacgaggtggcagaggcggcgactaatgcgtggatccagaaatttccaacggttaagattgacgatatctctgtcgtgtgtctctctctcaacaagaagcataatccacagccacaaatatgaacccagctttcttgtacaaag

SEQ ID NO: 1886 - protein, 326 aa, Arabidopsis thaliana
MGFCFCLSSGGSTDKSQIYEITDYGQENAVLYSDHHVVSQNLGSVSSLAGGKGLNQDAAILHLGYGTEEGALCGVFDGHGPRGAFVSKNVRNQLPSILLGHMNNHSVTRDWKLICETSCLEMDKRILKVKKIHDCSASGTTAVLAVKHGNQVMVANLGDSRAVMIGTSEDGETKVAQLTNDLKPSVPSEAERIRKRNGRVLALESEPHILRVWLPTENRPGLAMSRAFGDFLLKSYGVIATPQVSTHQITSSDQFLLLASDGVWDVLSNEEVATVVMKSASEAGAANEVAEAATNAWIQKFPTVKIDDISVVCLSLNKKHNPQPQI

SEQ ID NO: 1887 - DNA, 1321 bp, Arabidopsis thaliana
gcttaaacaatgtcaaacatcgttgttctagacaacggcggtggtctaatcaaagccggacaaggcggcgagcgtgatcccaccaccgtaatcccgaactgtctctacaaacctctctcttccaaaaaattcatccacccatcaccactcaccactctctccgacgaaatcgacctcacctccgccgccgtacgccgcccaatcgaccgtggctacctcataaactccgacctacaacgcgaaatctggtcacacctattcacttccctcctccacatagctccttcctcctcctctctcctcctcaccgaagcaccactctcaatcccttccgttcaacgaaccaccgacgaactcgtcttcgaagatttcggattctcttctctctatatagctcatcctcaatctcttgttcatctctatgaagctagtcgtcagcctgattcaatcctctcaaagactcagtgtagtctcgttgttgattgtggtttctccttcactcacgctgttcctgttcttcacaatttcactcttaatcacgccattaagaggattgatttaggaggaaaagcttttactaattacttgaaggaattggtttcttatagatctattaatgttatggatgaaacttttttagttgatgatgctaaagagaagctttgttttgtttcacttgatcttcttcgtgatctccgccttgctagaaatgggaacactcttatcaagtctacttatgttcttcctgatggtgttacacataccaaaggctatgttaaagaccctcaagctgctaagaggtttcttagtttgtcagagaaagagtctgtggtggtgatggataaggttggggagagaaagaaggctgacatgaacaaaaatgagattgatttaacgaatgagcgttttcttgtacctgagacgttattccagcctgcagatttagggatgaatcaggcgggacttgcagagtgcattgtccgagctataaactcatgccattcttacttgcaaccagttttgtatcaaagcattatcttaactggtggaagtacattatttccacaacttaaggagagactagaaggagagcttcgaccacttgtcccagatcactttgatgtgaagataacaactcaggaggaccccatactaggtgtatggagaggtggttcacttttggcttccagcccggatttcgagtccatgtgtgtcaccaaggctgagtacgaagaacttggatcagctcggtgtcgtagacgattctttcattgaggctaaccaaaacaatatcacatgaacccagctttcttgtacaaag

SEQ ID NO: 1888 - protein, 421 aa, Arabidopsis thaliana
MSNIVVLDNGGGLIKAGQGGERDPTTVIPNCLYKPLSSKKFIHPSPLTTLSDEIDLTSAAVRRPIDRGYLINSDLQREIWSHLFTSLLHIAPSSSSLLLTEAPLSIPSVQRTTDELVFEDFGFSSLYIAHPQSLVHLYEASRQPDSILSKTQCSLVVDCGFSFTHAVPVLHNFTLNHAIKRIDLGGKAFTNYLKELVSYRSINVMDETFLVDDAKEKLCFVSLDLLRDLRLARNGNTLIKSTYVLPDGVTHTKGYVKDPQAAKRFLSLSEKESVVVMDKVGERKKADMNKNEIDLTNERFLVPETLFQPADLGMNQAGLAECIVRAINSCHSYLQPVLYQSIILTGGSTLFPQLKERLEGELRPLVPDHFDVKITTQEDPILGVWRGGSLLASSPDFESMCVTKAEYEELGSARCRRRFFH

SEQ ID NO: 1889 - DNA, 332 bp, Triticum aestivum
tttgtacaaaaaagcaggcttaaacaatgtcgagccgtaggtcaaggtcaaggcagtccggctcgtcgaggatcactgacgagcaaatcagcgaccttgtctccaagttgcaggacctccttcccgaggcgcgtctccggggcaatgatagagtgccatcttcaagggtgctgcaggagacgtgcacctacatcaggagcctgcaccgggaggtggacgacctgagcgagaggctgtcggagctgctggcgacctcggacatgagcagcgcgcaagcggccatcatccgcagcttgctgatgtagagccggacccagctttcttgtacaaag

SEQ ID NO: 1890 - protein, 92 aa, Triticum aestivum
MSSRRSRSRQSGSSRITDEQISDLVSKLQDLLPEARLRGNDRVPSSRVLQETCTYIRSLHREVDDLSERLSELLATSDMSSAQAAIIRSLLM

SEQ ID NO: 1891 - DNA, 1308 bp, Medicago truncatula
tttgtacaaaaaagcaggcttaaacaatggcatcaacatcttgttttagtaagagtccattacccatgaaagagacagctttgagccatggtgaatatcctccacctatggcaacttatgaggaggttgtagacaatcccaagctcttcatactttgcttggagaagctccacactctaatgggcaccaagttcatgattcctgttattgggggaagggaattggatttacatcgcctctttgttgaagtgacttctcgtggtgggtttgaaaaaatcattaaagatagaaaatggaaagaagtaactttagttttcaattttccatcaacggctacaaatgcttcttttgtgctgcggaagtactatacttcattactctaccattatgaacaaatctattattttaaagctcgtgactggaccaacacaacttccgatgttttgcagagtcaatcatccatcccagctcctgctccaaagatgcagttttcgcatccttcaccccaagttcaaccagctgtctttcaacagttaaaagttaattctgcaccgcccgaagcaatgggatcatcttcggcaggatctcaggttgtcggggtcattgatgggaaatttgatagtggctatctagttactgtcacaattggttcggagaaactcaaaggcgtactttatcaagctccacaaaatcctgtgctgccagcatcccaccatagtgttcctgctaataacaacaacgtgaccgcctctgtcggtgtccatcgtcgccgacgcaggaagaaatcagagatgaaaaagagagatcctgctcacccaaaaccaaacagaagtggatacaatttcctctttgcagaacaacatccaaggctaaaacctcttcaccgagggaaggaccgagaaattagtaggaccattggtgaactctggaacaagttacctgaatcagaaaaagcagtttatcaagataaagccgtgaaggacaaagagaggtacataacagaaatggagtattaccgtgagaagctgaagaatgatgaagtcatcagtgatgctgtgccacttcgacagcgacttcctgaaccagatactgacatgttgaatgctgaggcagactctcttcaaactccggagcagagtagtttggacggaagtgatgactatgaagatgataaggcgaaggagaaagactttagtgtggattcattgcctgttataggacttggtgctgaatctatggattcagtagagagatcgtccaagttgggtttatgagcatcttcaggaacccagctttcttgtacaaagt

SEQ ID NO: 1892 - protein, 415 aa, Medicago truncatula
MASTSCFSKSPLPMKETALSHGEYPPPMATYEEVVDNPKLFILCLEKLHTLMGTKFMIPVIGGRELDLHRLFVEVTSRGGFEKIIKDRKWKEVTLVFNFPSTATNASFVLRKYYTSLLYHYEQIYYFKARDWTNTTSDVLQSQSSIPAPAPKMQFSHPSPQVQPAVFQQLKVNSAPPEAMGSSSAGSQVVGVIDGKFDSGYLVTVTIGSEKLKGVLYQAPQNPVLPASHHSVPANNNNVTASVGVHRRRRRKKSEMKKRDPAHPKPNRSGYNFLFAEQHPRLKPLHRGKDREISRTIGELWNKLPESEKAVYQDKAVKDKERYITEMEYYREKLKNDEVISDAVPLRQRLPEPDTDMLNAEADSLQTPEQSSLDGSDDYEDDKAKEKDFSVDSLPVIGLGAESMDSVERSSKLGL

SEQ ID NO: 1893 - DNA, 996 bp, Oryza sativa
gttcgttgcacaaattgatgagcaatgcttttttataatgccaactttgtacaaaaaagcaggcttaaacaatggggcgggggaaggtgcagctgaagcggatagagaacaagatcaacaggcaggtgacgttctccaagaggaggaatggattgctgaagaaggcgcacgagatctccgtcctctgcgacgccgaggtcgccgccatcgtcttctcccccaagggcaagctctacgagtacgccactgactccaggatggacaaaatccttgaacgttatgagcgctattcatatgctgaaaaggctcttatttcagctgaatccgagagtgagggaaattggtgccatgaatacaggaaacttaaggcaaagattgagaccatacaaaaatgtcacaaacacctcatgggagaggatctagaatccctgaatctcaaagaactccaacagctagagcagcagctggagagttcattgaagcacataatatcaagaaagagccaccttatgcttgagtccatttccgagctgcagaaaaaggagaggtcactgcaggaggagaacaaggctctgcagaaggaactggtggagaggcagaagaatgtgaggggccagcagcaagtagggcagtgggaccaaacccaggtccaggcccaggcccaagcccaaccccaagcccagacaagctcctcctcctcctccatgctgagggatcagcaggcacttcttccaccacaaaatatctgctacccgccggtgatgatgggcgagagaaatgatgcggcggcggcggcggcggtggcggcgcagggccaggtgcaactccgcatcggaggtcttccgccatggatgctgagccacctcaatgctctagatctggatctagaactccgtttgggtttcgcttagacccagctttcttgtacaaagttggcattataagaaagcattgcttatcaatttgttgcaacgaacaggtcactatcagtcaaaa

SEQ ID NO: 1894 - protein, 279 aa, Oryza sativa
MGRGKVQLKRIENKINRQVTFSKRRNGLLKKAHEISVLCDAEVAAIVFSPKGKLYEYATDSRMDKILERYERYSYAEKALISAESESEGNWCHEYRKLKAKIETIQKCHKHLMGEDLESLNLKELQQLEQQLESSLKHIISRKSHLMLESISELQKKERSLQEENKALQKELVERQKNVRGQQQVGQWDQTQVQAQAQAQPQAQTSSSSSSMLRDQQALLPPQNICYPPVMMGERNDAAAAAAVAAQGQVQLRIGGLPPWMLSHLNALDLDLELRLGFA

SEQ ID NO: 1895 - DNA, 1097 bp, Populus trichocarpa
ttcgttgcacaaattgatgagcaatgcttttttataatgccaactttgtacaaaaaagcaggcttaaacaatggaggatctgtacggagcggcagcggctactgagccggaagaaatctcgactttccttcatcaactcctccacaacaactcttcttccccttctaaattcatgcatcatgccctctctaccccagtggagaatggcgtggaattgttagatcgccaccggttttctgagacggagtgtggtgctggtgttaatttctctgatcctgatggttattatgctaaagaaggcgtgggaaatgcggtcgtttcaaagaggggaggagtctctgtggaggatgatctaggtgattttagctgcgatagtgagaagggggtggaggtgcaagctaatacagcgcggccgcgaagttcgtcgaagaggagtagagctgcggaggttcataatttatctgaaaagaggaggaggagtaggatcaatgagaaaatgaaagcattacagaatttaattcctaattctaataagacggataaggcttcgatgctggatgaggccattgaatacttgaagcagcttcagcttcaagtgcagatgctaacaatgagaaatggattgagtttgcacccgatgtgcttaccaggagcactacagccaatgcagctgcccttgtcaggaatgagctttgatgaagggattggattgttaactaccaatacattaacaggcatattttctgcaaatgaagaaagctcagagcaaaattctcttaatcttccaacccagtgcactatctcaaatcaaccaatcactattccttcagggacaaatattacctcatcagaaaccaacttcggttttgaaccacagatccatgttaaccatgcacctttcaatctgtccacgtcttcaaaggaaatctgcagggaaggcacaccacaggcaaagctagagatgaatcaaactacgaagacctccccatctggtgtggcctagttatgaacccagctttcttgtacaaagttggcattataagaaagcattgcttatcaatttgttgcaacgaacaggtcactatcagtcaaaataa

SEQ ID NO: 1896 - protein, 310 aa, Populus trichocarpa
MEDLYGAAAATEPEEISTFLHQLLHNNSSSPSKFMHHALSTPVENGVELLDRHRFSETECGAGVNFSDPDGYYAKEGVGNAVVSKRGGVSVEDDLGDFSCDSEKGVEVQANTARPRSSSKRSRAAEVHNLSEKRRRSRINEKMKALQNLIPNSNKTDKASMLDEAIEYLKQLQLQVQMLTMRNGLSLHPMCLPGALQPMQLPLSGMSFDEGIGLLTTNTLTGIFSANEESSEQNSLNLPTQCTISNQPITIPSGTNITSSETNFGFEPQIHVNHAPFNLSTSSKEICREGTPQAKLEMNQTTKTSPSGVA

SEQ ID NO: 1897 - DNA, 1275 bp, Solanum lycopersicum; identical to SEQ ID NO: 171

SEQ ID NO: 1898 - protein, 411 aa, Solanum lycopersicum; identical to SEQ ID NO: 172

SEQ ID NO: 1899 - DNA, 1182 bp, Oryza sativa
atggcggcaggggagcaaccgggaactgggtcgccgccgcagccgtcgacccgcctcttcctcctcgtcctcgcagtcatcctcacagatcaagtgctagcggcatcagctcaaggcatgtcaatcgggatcaactacgggcagatcgcggacaacctcccttctccgaccagggtctcgggtctcctccggtcaatgcagatcagcaaggtgaagctctacgacgccgaccagaacgtcctgagcgcgttcctcgacacgggcgtggagttcgtcgtcggcatcggcaacgagaacgtgtcggcgatggtggactcggcggcggcgcaggcgtgggtgcagcagcacgtccgcccctacctcccgagcgcgcgcatcacctgcatcaccgtcgggaacgaggtgttcaagggcaacgacaccgcgctcaaggccaacctcctgccggcgatgcagtccgtgtacaacgccgtcgtcgcgctcgggctgcagggccaggtgaacgtcacgacggcgcactccctggacatcatgggcagctcctaccctccctccgccggcgcgttccggcccgacgccgtgccgtacatccagccgctgctcaacttcctgtccatggcggggtccccgttcctgatcaactgctacccgtacttcgcctacaaggccgacccgggcagcgtgccgctggagtacgtcctcttccagcccaacgccggcgtgaccgacccaaacacgaagctcaactacgacaacatgctgtacgcccagatcgactcagtgtacgccgcgatgcaggcgctgggccacaccgacgtcgacgtgaagatctccgagaccgggtggccgtccaggggcgaccccgacgaggccggcgcgacgccggagtacgccgggatctacatcggcaacctcctgcggaggatcgagatgaagcaggggacgccgctgaggccgtcgtcgcccatcgacgtctacgtctttgcgctgttcaacgagaacctcaagccggggccggcatccgagcggaactacgggctgttctaccccgacggcacgccggtctacgacgtcggcctgcgcgggtatctcccgccgatggacgaatcgaaaagcgcgcgaaaggcggtttcagtgttagctctcatcgccattgcatcgatcactctcatcttatcctga

SEQ ID NO: 1900 - protein, 393 aa, Oryza sativa
MAAGEQPGTGSPPQPSTRLFLLVLAVILTDQVLAASAQGMSIGINYGQIADNLPSPTRVSGLLRSMQISKVKLYDADQNVLSAFLDTGVEFVVGIGNENVSAMVDSAAAQAWVQQHVRPYLPSARITCITVGNEVFKGNDTALKANLLPAMQSVYNAVVALGLQGQVNVTTAHSLDIMGSSYPPSAGAFRPDAVPYIQPLLNFLSMAGSPFLINCYPYFAYKADPGSVPLEYVLFQPNAGVTDPNTKLNYDNMLYAQIDSVYAAMQALGHTDVDVKISETGWPSRGDPDEAGATPEYAGIYIGNLLRRIEMKQGTPLRPSSPIDVYVFALFNENLKPGPASERNYGLFYPDGTPVYDVGLRGYLPPMDESKSARKAVSVLALIAIASITLILS

SEQ ID NO: 1901 - DNA, 1080 bp, Oryza sativa
taaacaatggccaagctagctcagatgccgcgcgctcctctgctcgtcctgctgctgatgctgggggtcggcgcggcggtggccgtgccggagtacagggaggcgccgcacttcaccaactcggcggcggcgcggtgcccgccgccgctgccggcgacggacgcggacgcggcgtgctcgccgcacgcggcggtgcacgtggccatgacgctggacgcgccgtacctgaggggcaccatggccgcggtgctctccgtcctccgccacgcctcctgcccggagtccgtccacttccacttcctcgcctcctcctcctcgtcgccggaggcggcggcggcggtgcgggagctgagggacaccgtgcgggcgtcgttcccgtcgctggcgttccgggtgtacccgttcgacgagtcccgcgtcgcggggctcatctccacctccatccgcggcgcgctcgaccgcccgctcaactacgcccgctcctacctcgccaccacgctccccgcctgcgtccgccgcgtcgtctacctcgactccgacgtcgtggtcaccgacgacatcgcggcgctcgccgcgacgccgctcccgggggaggcggccgtggcggcgcccgagtactgcggcgccaacttcacggcctacttcacgccggggttctgggcgtcgcgggcgctgtcggaggcggcgttcgcggggcggcgcgcgtgctacttcaacacgggggtgatggtgctcgacctgccccggtggcggcgcgcggggtacacggcgcagatcgaggagtggatggagctgcagagacgggtgcgcatctacgagctgggctcgctgccgccgttcctcctcgtgttcgccggccgcatcgccgccgtcgaccaccgctggaaccagcacggcctcggcggcgacaactaccgggggctctgccgcggcctgcacgccggcgccgtcagcctcctgcactggagcggcaaggggaagccatgggacaggctcgacgccggcaagccgtgcccgctcgacgccgtctgggccaagtacgacctgctccggccggcggcggcgatcgagacctcgtga

SEQ ID NO: 1902 - protein, 357 aa, Oryza sativa
MAKLAQMPRAPLLVLLLMLGVGAAVAVPEYREAPHFTNSAAARCPPPLPATDADAACSPHAAVHVAMTLDAPYLRGTMAAVLSVLRHASCPESVHFHFLASSSSSPEAAAAVRELRDTVRASFPSLAFRVYPFDESRVAGLISTSIRGALDRPLNYARSYLATTLPACVRRVVYLDSDVVVTDDIAALAATPLPGEAAVAAPEYCGANFTAYFTPGFWASRALSEAAFAGRRACYFNTGVMVLDLPRWRRAGYTAQIEEWMELQRRVRIYELGSLPPFLLVFAGRIAAVDHRWNQHGLGGDNYRGLCRGLHAGAVSLLHWSGKGKPWDRLDAGKPCPLDAVWAKYDLLRPAAAIETS

SEQ ID NO: 1903 - DNA, 1111 bp, Populus trichocarpa
ccgggccgttgcttcacaacgttcaaatccgctcccggcggatttgtcctactcaggagagcgttcaccgacaaacaacagataaaacgaaaggcccagtcttccgactgagcctttcgttttatttgatgcctggcagttccctactctcgcgttaacgctagcatggatgttttcccagtcacgacgttgtaaaacgacggccagtcttaagctcgggccccaaataatgattttattttgactgatagtgacctgttcgttgcaacaaattgatgagcaatgcttttttataatgccaactttgtacaaaaaagcaggcttaaacaatgtctagcagaaggccaaggcaatctagcgttccaaggatcactgatgatcagatcatcgaccttgtctccaaattacgccagcttctccctgagattagtcaaaggcgctccgataaggtatcagcttccaaggtcctacaagagacttgcaattatatcaggaacttgcacagggaggttgatgacttaagtgagcgattgtctcagcttttggcaacaattgatgctgatagtcctgaagcagcgataataaggagtttaattatgtaatatcaattaattagatgatcaggcaccggacccagctttcttgtacaaagttggcattataagaaagcattgcttatcaatttgttgcaacgaacaggtcactatcagtcaaaataaaatcattatttgccatccagctgatatcccctatagtgagtcgtattacatggtcatagctgtttcctggcagctctggcccgtgtctcaaaatctctgatgttacattgcacaagataaaaatatatcatcatgatcagtcctgctcctcggccacgaagtgcacgcagttgccggccgggtcgcgcagggcgaactcccgcccccacggctgctcgccgatctcggtcatggccggcccggaggcgtcccggaagttcgtggacacgacctccgaccactcggcgtacagctcgtccaggccgcgcacccacacccaggccagggtgttgtccggcaccacctggtcctggaccgcgctgatgaacagggtcacgtcgtcccggaccaca

SEQ ID NO: 1904 - protein, 90 aa, Populus trichocarpa
MSSRRPRQSSVPRITDDQIIDLVSKLRQLLPEISQRRSDKVSASKVLQETCNYIRNLHREVDDLSERLSQLLATIDADSPEAAIIRSLIM

SEQ ID NO: 1905 - DNA, 1196 bp, Populus trichocarpa
tcgttgcacaaattgatgagcaatgcttttttataatgccaactttgtacaaaaaagcaggcttaaacaatgtctcaaaactcagctgacctcccatggaaggtaaggctctttacatccctcatctccttcacctttaaagtcatgattcgtcgctctgatggatctctgaaccgcctcttgctcaactttctcgactataaaacctctccatcgcctgacaagcccatagatggtgtcacaaccactgatttcactattgatgaagaccgcaacctttggttccgcctctacaaccccgtcttcagaacttcaaccaccgacaatgaagttaacatcccagttattttcttcttccacgggagtgggttcgtctgcatggcggccaattcaaagctgtttgatgatttatgctacaggctcgcccgcctgctacctgcagtcatcatctctgtaaactacaggctggctcctgagcataggtatccatgccaatatgaagacggttttgatgttataaaatttattgatatatcataccttgaagtccttccaaaccatgccaatctcaagcacagttttgttgctggagacagtgctggtggcaatctagctcatcacatggcactaaaggctagcaaatatgaactttccaacataaaactgaatggagttatagccatacagccattctttggaggagaagagcgtacaggatctgaaatcaagctttccagagatcccattgttccaatgggtactacagactggatgtggagatcgtttctgccagagggttcgaatcgggaccatcaggtgtcgaatgtttttgggcctaactctgttgacatttcagagcttgaattccctgcagttcttgttattattggggggttggatcctctccaggactggcaaaagaggtactgcgagggactgaagaaaagtggaaaagaagtgtatttagtggagtatgacaacgcattccattcattttacctttttccttgtgtgcctgagttttctttgtttatcaaggaagtgaaagattttatgcaaaagcaaatgtccagatgaagaaatacccagctttcttgtacaaagttggcattataagaaagcattgcttatcaatttgttgcaacgaacaggtcactatcagtcaaaataaaatcattatttgccatccagctgat

SEQ ID NO: 1906 - protein, 335 aa, Populus trichocarpa
MSQNSADLPWKVRLFTSLISFTFKVMIRRSDGSLNRLLLNFLDYKTSPSPDKPIDGVTTTDFTIDEDRNLWFRLYNPVFRTSTTDNEVNIPVIFFFHGSGFVCMAANSKLFDDLCYRLARLLPAVIISVNYRLAPEHRYPCQYEDGFDVIKFIDISYLEVLPNHANLKHSFVAGDSAGGNLAHHMALKASKYELSNIKLNGVIAIQPFFGGEERTGSEIKLSRDPIVPMGTTDWMWRSFLPEGSNRDHQVSNVFGPNSVDISELEFPAVLVIIGGLDPLQDWQKRYCEGLKKSGKEVYLVEYDNAFHSFYLFPCVPEFSLFIKEVKDFMQKQMSR

SEQ ID NO: 1907 - DNA, 1402 bp, Populus trichocarpa
acggccagtcttaagctcgggccccaaataatgattttattttgactgatagtgacctgttcgttgcaacaaattgatgagcaatgcttttttataatgccaactttgtacaaaaaagcaggcttaaacaatggcaggcttttcatatcaacatcaaccgttgtttcctgactcggctttcttgccaagcatagccacacccactaagaacatgaacaacaacatgtatggttcttttgaggaagctggaaacatgatgaataccaacggtttctcccaaatttactctcctgaaacttttcatgaaacacctagtcttgatgttagatttcatcaaagtagccatcctgatgatcatagctataaggtgtctcttagtgataatgagacttctttgactaaaaaacagagcacaaactcctcaaccgtggttgataagcttgaaagtgagcacgttactcaagaggtaactcccatggccaggaagaggaaaagtgctaatgggttcttgaattctgctcaatcaaaggatgctagaaaagtgaaaagcaagagacaaaataaatgcagtggtgacatgaaacacgaagagaagaagccaaaagttgagaagaaagttcatggagagcctccagcaggctacattcatgtaagagcaaggaggggccaagcaacagacagccacagccttgctgagagggtaagaagagagagaatcagtgagagaatgaagatactacagcttcttgttcctggctgtgacaagattactgggaaggcccttatgctggacgagattattaattatgttcagtccctgcaaaatcaagtggagttcctatccatgaagcttgcctctgttaatcccttgctctatgattttggaatggaccgtgatgcattcatggttagaccagagagattaagtagcatgtctccaccactgccatctctgcaacacaacagtcctatccagcccacagcttttgccgacaccgcctccgccaccaccgccacctttgctacagaagaaaataactatcctcttattgataattctgctacgctttttcttcaaggaatgaggcctagtgacttcactactcatcaggatagtggttacctaatgtgggatgtggatgagcaaagacaaaaatttcttaatccatctgggcttgccaccaacttgtgttctttccattaaaataaatataccaagcgctgccacccagctttcttgtacaaagttggcattataagaaagcattgcttatcaatttgttgcaacgaacaggtcactatcagtcaaaataaaatcattatttgccatccagctgatatcccctatagtgagtcgtattacatggtcatagctgtttcctggcagctctggcccgtgtct

SEQ ID NO: 1908 - protein, 357 aa, Populus trichocarpa
MAGFSYQHQPLFPDSAFLPSIATPTKNMNNNMYGSFEEAGNMMNTNGFSQIYSPETFHETPSLDVRFHQSSHPDDHSYKVSLSDNETSLTKKQSTNSSTVVDKLESEHVTQEVTPMARKRKSANGFLNSAQSKDARKVKSKRQNKCSGDMKHEEKKPKVEKKVHGEPPAGYIHVRARRGQATDSHSLAERVRRERISERMKILQLLVPGCDKITGKALMLDEIINYVQSLQNQVEFLSMKLASVNPLLYDFGMDRDAFMVRPERLSSMSPPLPSLQHNSPIQPTAFADTASATTATFATEENNYPLIDNSATLFLQGMRPSDFTTHQDSGYLMWDVDEQRQKFLNPSGLATNLCSFH

SEQ ID NO: 1909 - DNA, 961 bp, Populus trichocarpa
tttgtacaaaaaagcaggcttaaacaatggggagggtaccttgttgtgataaagatgaagtaaagaaaggaccttggactcctgaagaagaccaactcttggttcagtacattcaaaaacatggtcttggttgctggcgtagcctccctaagaacgcaggcctccttcgatgtgggaagagctgtcggcttcggtggactaactatcttcgccctgacattaaacgtggtcccttctctcctgcagaagaggctactattgttcatcttcatggcatgctcggtaacaagtgggcatacatggcatctcaattaccaggaagaacagacaatgagataaaaaacttctggaacacccacctgaagaagcgcctaacttctattggtccaaagttgcagatcaaccagtcatcctcctcttctgaacctatcaatatcaagtgcaaatctccttcagcacgccacatggtacaatgggagagtgctagagttgaggctgaggcccgtttgtcaaagcagtcattgcttattaaaccaacatcaacagctaagagccgtcctgatatctttctccaattatggaaatctgaagttggagaaacatttcgcattactgaggaaaaatatggaaaaacatgtgaaagtcttgtatctgacacacctccatcgataaaaaatgaatctgttttcctcgacgacacggtttcaccaaagcctttcaaaacaactaccttcatggacaccacgcaggaacaagaagatacttgcaagccaaatgaagatgtgatgactgtttcagattccattggttccaatgaatttgctgattctacagatacagcattgaaactactgttagatttcccaggaggcaatgatatggaattcataggggaagaatcagagttttttcaacttccttgattttagctgcgactgaacccagctttcttgtacaaagt

SEQ ID NO: 1910 - protein, 298 aa, Populus trichocarpa
MGRVPCCDKDEVKKGPWTPEEDQLLVQYIQKHGLGCWRSLPKNAGLLRCGKSCRLRWTNYLRPDIKRGPFSPAEEATIVHLHGMLGNKWAYMASQLPGRTDNEIKNFWNTHLKKRLTSIGPKLQINQSSSSSEPINIKCKSPSARHMVQWESARVEAEARLSKQSLLIKPTSTAKSRPDIFLQLWKSEVGETFRITEEKYGKTCESLVSDTPPSIKNESVFLDDTVSPKPFKTTTFMDTTQEQEDTCKPNEDVMTVSDSIGSNEFADSTDTALKLLLDFPGGNDMEFIGEESEFFQLP

SEQ ID NO: 1911 - DNA, 832 bp, Populus trichocarpa
ttattttgactgatagtgacctgttcgttgcaacaaattgatgagcaatgcttttttataatgccaactttgttcaaaaaagcaggcttaaacaatgaagaactgtcatgagcctaaggctcagaaggtgaatattttatcgtcgtcgtcgtcttcattgccatcattgaactcctcagattctgaagatctggagcgcatgccattggcaccacttatattgaaaaacaagaaacgattgtccaagcaactctcaatgtgcgagactcgacgtgacagagcgtgggagagacgccgccgccaaatactaatgcaagagaggagaaggagcgggctgctagaatctgatgacttgacagatgaagacttgcatgagctcaaagggtgtatagagcttggatttggatttaaagaggaagagggacatcaattgaccaatacattgccagcattggatctctattttgcagttaaccggcaactctcgccaagtccggtgtccacgccgcaaagtggcgacttatcttcttcatcatcttcagcaatgggcacgcgttcatcttcatttgggagccccatgagtgatccagactggaaaatatgcagcccaggtgatgatccaaagcaggttaagaccaagttaaggcactgggcacaagctgtagcttgttcagtcatgcagtcttattgatcaaagtgcgggatagattgtacagagctacccagctttcttgtacaaagttggcattataagaaagcattgcttatcaatttgttgcaacgaacaggtcactatcagtcaaaataaaatcattatttgccatccagctga

SEQ ID NO: 1912 - protein, 198 aa, Populus trichocarpa
MKNCHEPKAQKVNILSSSSSSLPSLNSSDSEDLERMPLAPLILKNKKRLSKQLSMCETRRDRAWERRRRQILMQERRRSGLLESDDLTDEDLHELKGCIELGFGFKEEEGHQLTNTLPALDLYFAVNRQLSPSPVSTPQSGDLSSSSSSAMGTRSSSFGSPMSDPDWKICSPGDDPKQVKTKLRHWAQAVACSVMQSY

SEQ ID NO: 1913 - DNA, 633 bp, Solanum lycopersicum
atggttgttgaagtttgtgtcaaggctgctgtgggtgcccctgatgtccttggagactgtccatttagccaaagggtacttctgacattggaggaaaagaaagtgacttacaagaagcacttgatcaatgttagtgacaagcccaaatggttcttggaggtgaaccctgaagggaaagttcccgtgatcaattttggtgacaaatggatcccagattctgatgtcattgttgggattattgaagagaaatacccaaatccctctctcattgctccccctgaatttgcctctgtgggctcgaaaatatttcctaccttcgtctcatttctgaagagcaaggattctagtgacagtactgagcaggctctccttgatgaactaaaggctttggaagagcatctcaaggctcatggaccatatatcaatgggcagaatgtttgttcagttgatatgagcttggctccaaaactgtaccatctcgaggtggctcttggacacttcaagaagtggagtgtgcctgaaagcttgagtcatgtgcgtaactacatgaagctgctcttcgagcgagagtcgttccagaaaaccaaggctgaagagaagtacgtcatcgcagggtgggctccaaaggtttaa

SEQ ID NO: 1914 - protein, 210 aa, Solanum lycopersicum
MVVEVCVKAAVGAPDVLGDCPFSQRVLLTLEEKKVTYKKHLINVSDKPKWFLEVNPEGKVPVINFGDKWIPDSDVIVGIIEEKYPNPSLIAPPEFASVGSKIFPTFVSFLKSKDSSDSTEQALLDELKALEEHLKAHGPYINGQNVCSVDMSLAPKLYHLEVALGHFKKWSVPESLSHVRNYMKLLFERESFQKTKAEEKYVIAGWAPKV

SEQ ID NO: 1915 - DNA, 639 bp, Antirrhinum majus
atgtcgttggagatctgcgccaaacagtccctcaccacacctggcaaactcggagactgccccttcactcaaagagttttgcttacactggaggaaaaacatgttccatatgagttgaaattggtggatttgaaaaacaaacctcaatggtttcttgaactaactccagagggtaaagtacccttgatcaagcttcacgacaagtggattccggactcagatgtcatcacgcaggcactggaagacaagtttcctgaaccccccttggccacaccgcccgacaaggcttcagtcggttccaagattttctcaacatttgttgcctttcttaagagcaaagactctagtgatggaacagagcaggcactactcagtgagctgactgcccttaacaagcacctcgaagaaaatggcccgttcatcaatgggaaagaggtatctgcagcagatttgtctcttggaccaaagctctaccatctagagattgctctgggacactacaaaaagtggtctatcccagattcacttacctatgtgaagtcatacatgaagactatattctccagggattcatttatgaagactcgcgctctgacagaagatgttattgagggttggcgatcaaaggttgaaggttga

SEQ ID NO: 1916 - protein, 212 aa, Antirrhinum majus
MSLEICAKQSLTTPGKLGDCPFTQRVLLTLEEKHVPYELKLVDLKNKPQWFLELTPEGKVPLIKLHDKWIPDSDVITQALEDKFPEPPLATPPDKASVGSKIFSTFVAFLKSKDSSDGTEQALLSELTALNKHLEENGPFINGKEVSAADLSLGPKLYHLEIALGHYKKWSIPDSLTYVKSYMKTIFSRDSFMKTRALTEDVIEGWRSKVEG

SEQ ID NO: 1917 - DNA, 777 bp, Arabidopsis thaliana
atgataagccttaggtttcaaccaagcaccaccgccggtgttttatcggcgtcagtgagccgcgccggttttatcaagcggtgcggttcgactaaaccgggaagggttggccggtttgttacaatggcgacggcggcgagtcctcttgaaatctgcgttaaagcttctatcaccactcccaacaagctcggagactgccctttttgccaaaaggtgttactgacaatggaggagaagaatgttccttatgacatgaaaatggtggatttgagtaacaaaccagaatggttcttgaagattagtccagaaggtaaagtcccagttgtgaagtttgatgagaaatgggttccggattcagatgttataacacaggctttagaagagaagtatcctgagcctcctcttgctaccccacctgaaaaggcttcagttggatcgaagatcttttccacatttgtcggttttctgaagagcaaagattcaggagatggaactgagcaagttttgttggatgagcttactacattcaacgattatatcaaggacaatggccctttcataaatggagagaagatctcggcagcagatttgtccttggcaccaaagttataccacatgaagattgcattgggacattacaagaactggtctgttccagattcacttcctttcgtcaaatcctacatggagaatgttttctcgagggaatcattcacgaacacacgggcggaaacagaggatgtaattgctggttggagaccaaaggttatgggttaa

SEQ ID NO: 1918 - protein, 258 aa, Arabidopsis thaliana
MISLRFQPSTTAGVLSASVSRAGFIKRCGSTKPGRVGRFVTMATAASPLEICVKASITTPNKLGDCPFCQKVLLTMEEKNVPYDMKMVDLSNKPEWFLKISPEGKVPVVKFDEKWVPDSDVITQALEEKYPEPPLATPPEKASVGSKIFSTFVGFLKSKDSGDGTEQVLLDELTTFNDYIKDNGPFINGEKISAADLSLAPKLYHMKIALGHYKNWSVPDSLPFVKSYMENVFSRESFTNTRAETEDVIAGWRPKVMG

SEQ ID NO: 1919 - DNA, 831 bp, Aquilegia sp.
atgtcgagcgctaccagcatcattcctccaactgcttttgtagcactttcttccactctcaaatatcgagttaacaaattttctcaaaacaataataataatatcaagaacttcttcttcactgcacgcagaaacagcagcagaacacgaagaagcctaacaattactagtatgtctactactacttcatcagatcctcttgaagtctgcgtcaaagcttctattacttctcctggcaagcttggtgactgtccctttacacaaagagttttgcttacacttgaggagaagcatctcccttatgagatgaagttggtagatttgactaacaagccagaatggttcttgaaaatcagtccagaaggcaaagttccagtaattaaactcgaggaaaagtggattgctgattcagatgttattacacaatcattggatgagaagtatcctgatccatcattggcagctcctcctgagaaagcttcagttggatcgaagatattctctacattcgttggtttcctcaagagcaaggaccctagtgatggaaccgagcaggcattgcttaatgaattaactgtcttcaacgattacatcaaagagaatgggccctttatcaatggcaaagatgtctctgcgccagacttagctcttggacctaaactataccatttggagatcgcattgagctactataagaactggtcaattcctgattcactttcctatacgaagtcttacatgaagacaattttctctcgagagacatttgttaatactcgagctctcaaagaggatgtgattgctggatggcgctcaaaagtgatgggttaa

SEQ ID NO: 1920 - protein, 276 aa, Aquilegia sp.
MSSATSIIPPTAFVALSSTLKYRVNKFSQNNNNNIKNFFFTARRNSSRTRRSLTITSMSTTTSSDPLEVCVKASITSPGKLGDCPFTQRVLLTLEEKHLPYEMKLVDLTNKPEWFLKISPEGKVPVIKLEEKWIADSDVITQSLDEKYPDPSLAAPPEKASVGSKIFSTFVGFLKSKDPSDGTEQALLNELTVFNDYIKENGPFINGKDVSAPDLALGPKLYHLEIALSYYKNWSIPDSLSYTKSYMKTIFSRETFVNTRALKEDVIAGWRSKVMG

SEQ ID NO: 1921 - DNA, 774 bp, Brassica juncea
atgataagccttagatttcaaccaagcaccgccggtgttctatcggcgccggtcggccgcgcagggcttatcaagggattcggtttgaccaaaccgagaagaaccgtccggttaggaacagtggctatggcggctgctcctctcgaaatctgcgtcaaagcttccatcaccacacccaacaagctcggagactgccctttttgccaaagggtgttgctgaccatggaggagaagcatgtaccttatgacatgaaaatggtggatttgagtaacaagccagagtggttcttgaaaattaatgcagaaggaaaagtcccggtggtgaagtttgatgagaaatgggttccggattctgatgtcataacacatgctttggaagacaagtaccctgagcctcctctagcaaccccacccgaaaaggcttcagttgggtcgaagatcttctccacgtttatcggttttctgaagagcaaagatccaaaagatggaactgagcaagttttactggatgagcttagtacattcaacgattatctcaaagaaaatggaccttacataaacggagagaagatctcagcagcggatttgtccttggcaccaaagttataccacatgaagattgcacttggacatttcaagaactggtctgttccagattcacttcctttccttaaatcctacatggagaatgtgttctcgagggaatcattcaagaatacagaggcgcaaacagaggatgtgattgctggttggagaccaaaggtgatgggctaa

SEQ ID NO: 1922 - protein, 257 aa, Brassica juncea
MISLRFQPSTAGVLSAPVGRAGLIKGFGLTKPRRTVRLGTVAMAAAPLEICVKASITTPNKLGDCPFCQRVLLTMEEKHVPYDMKMVDLSNKPEWFLKINAEGKVPVVKFDEKWVPDSDVITHALEDKYPEPPLATPPEKASVGSKIFSTFIGFLKSKDPKDGTEQVLLDELSTFNDYLKENGPYINGEKISAADLSLAPKLYHMKIALGHFKNWSVPDSLPFLKSYMENVFSRESFKNTEAQTEDVIAGWRPKVMG

SEQ ID NO: 1923 - DNA, 774 bp, Brassica napus
atgataagccttagatttcaaccaagcaccgccggtgttctatcggcatcggtcaaccgcgccggatttatcaaacggagcggtttgactaaaccgagaagaaccgcccggttcgggacgatggctatggcggcttctcctctcgaaatctgcgtcaaagcttccatcaccacacccaacaagctcggagactgccctttttgccaaagggtgttgctgactatggaggagaagcatgtaccttatgacatgaaaatggtggatttgagtaacaagcctgagtggttcttgaaaattaatgcagaaggtaaagtcccggtggtgaagtttgatgagaaatgggttccggattctgatgtcataacacaagctttggaagacaagtaccctgagcctcctctagcaaccccacccgaaaaggcttcagttgggtcgaagatcttctccacgtttatcggttttctcaagagcaaagatccaaaagatggaactgagcaagttttactggatgagcttagtacattcaacgactatctcaaagaaaatggaacttacataaacggagagaagatatcagcagcggatttgtccttggcaccaaagttataccacatgaagattgcacttggacatttcaagaactggtctgttccagattcacttcctttccttaaatcctacatggagaatgtgttctcgagggagtcattcaagaatacagaggcgcaaacagaggatgtgattgctggttggagaccaaaggtgatgggttaa

SEQ ID NO: 1924 - protein, 257 aa, Brassica napus
MISLRFQPSTAGVLSASVNRAGFIKRSGLTKPRRTARFGTMAMAASPLEICVKASITTPNKLGDCPFCQRVLLTMEEKHVPYDMKMVDLSNKPEWFLKINAEGKVPVVKFDEKWVPDSDVITQALEDKYPEPPLATPPEKASVGSKIFSTFIGFLKSKDPKDGTEQVLLDELSTFNDYLKENGTYINGEKISAADLSLAPKLYHMKIALGHFKNWSVPDSLPFLKSYMENVFSRESFKNTEAQTEDVIAGWRPKVMG

SEQ ID NO: 1925 - DNA, 774 bp, Brassica oleracea
atgataagccttaggtttcaaccaagcaccgccggtgttttatcggcgccgatcagtcgcgccggatttatcaagcggtgcggtttgattaagccgagaagaaccgtacggttaggaacagtggctatggcggctgctcctctcgaaatctgcgtcaaagcttccatcaccacacccaacaagctcggagactgccctttttgccaaagggtgttgctgactatggaggagaagcatgtaccttatgacatgaaaatggtggatttgagtaacaagccagagtggttcttgaaaattaatgcagaaggtaaagtcccggtggtgaagtttgatgagaaatgggttccggattctgatgtcataacacaagctttggaagacgagtaccctgagcctcctctagcaaccccacccgaaaaggcttcagctgggtcgaagatcttctccacgtttatcggttttctcaagagcaaagatccaaaagatggaactgagcaagtgttactggatgagctgagtacattcaacgactatctcaaagaaaatggaccttacataaacggagagaagatttcagcagcggatttgtccttggcaccaaagttataccacatgaagattgcacttggacatttcaagaactggtctgttccagattcacttcctttccttaaatcctacatggagaatgtgttctcgagggaatcattcaagaatacagaggcgcaaacagaggatgtgattgctggttggagaccaaaggtgatgggttaa

SEQ ID NO: 1926 - protein, 257 aa, Brassica oleracea
MISLRFQPSTAGVLSAPISRAGFIKRCGLIKPRRTVRLGTVAMAAAPLEICVKASITTPNKLGDCPFCQRVLLTMEEKHVPYDMKMVDLSNKPEWFLKINAEGKVPVVKFDEKWVPDSDVITQALEDEYPEPPLATPPEKASAGSKIFSTFIGFLKSKDPKDGTEQVLLDELSTFNDYLKENGPYINGEKISAADLSLAPKLYHMKIALGHFKNWSVPDSLPFLKSYMENVFSRESFKNTEAQTEDVIAGWRPKVMG

SEQ ID NO: 1927 - DNA, 807 bp, Beta vulgaris
atgtcgaccgttaaaataacaccaccagcatcagcagctgcttattctctctcatcaatatcatcaacctttaaacgtccggtggtcttctgtaatccccaattccagcattgcaatcgcaccaatttcaggcacacacccacaagagctctcgctgtttccatgtcttcccaacctctccaagtctgcgtcaaggaatctatcaccactccgaacaagcttggcgactgtccattctgccaaagggtgttgttgaccttagaagaaaagcatctcccttatgatatgaagctggtagatttgactaacaagccagactggttcactaaaatgaatccagaaggtaaagtacctgtaatgaaattcgatgaaaagtgggttccagattcagatgtcattgcaaagtctcttgaagagagatacccagatccacctttggcgacacttcctgagaagagttcagtgggatcaaaggtctttcctgcttttgttggttttcttaaaagcaaagacccaagtgatggaaaagagcaagaattactgaatgagctcagttccttcaacgataacctgaaagaaaatggacccttaatcaatggggaaaagatctctgctgcggacctatcacttggaccaaagctttaccacatggaaattgcactgggacattacaagaattggtcggttcctgactcacttccctatgtgaagtcttacatgaagaatatattttctagggattcatttcagaaaacaattgcatcatatgaggatgtcgttgctggctgggctaagcacatggcctga

SEQ ID NO: 1928 - protein, 268 aa, Beta vulgaris
MSTVKITPPASAAAYSLSSISSTFKRPVVFCNPQFQHCNRTNFRHTPTRALAVSMSSQPLQVCVKESITTPNKLGDCPFCQRVLLTLEEKHLPYDMKLVDLTNKPDWFTKMNPEGKVPVMKFDEKWVPDSDVIAKSLEERYPDPPLATLPEKSSVGSKVFPAFVGFLKSKDPSDGKEQELLNELSSFNDNLKENGPLINGEKISAADLSLGPKLYHMEIALGHYKNWSVPDSLPYVKSYMKNIFSRDSFQKTIASYEDVVAGWAKHMA

SEQ ID NO: 1929 - DNA, 822 bp, Coffea canephora
atgtcgacggcgaagataacaccgtcagccacagcactctccactactatcaagcacctcacctgcaatctcaacctccagaaccacgcccgcgttcgcaccctgttcaccggcgctgcatatccgacccggacgctcagacgaacaggcttcacggtatcaatgtcggcggcagcggcaactgaacctgtagaagtctgcgtgaaggcctccgtcaccactcccaacaagctcggcgattgccccttttcgcagagggttttgttgacattggaggaaaaacatctgccgtatgatgtgaagttggttgatttcgctaacaagccagattggttcttgcaaataagtcctgaaggtaaagtccctgtgttaaagctggaagataagtggattccagattcagacgttattacacaggcaatagaagaaaagtttcctgaaccgccattggcaacgccacctgagaaggcttctgctgggtcgaagatcttctccaaatttattggttttttgagaagcaaagatcccagtgatggaacagagaaggcattgcttgatgagttatctgctttcaatgattatcttaaagaaaatggcccactcatcaatggaacagaagtatctgctgcagatttgtcccttggaccaaagctttaccacttagagatttctttagggcattataagaattggtcagttccggactctcttacatatctgaagtcatacatgaaggctatattttctttggagtccttcatcaaaacacgggctcaaccagaggatgttattgagggttggcgaccaaaagttgagggctaa

SEQ ID NO: 1930 - protein, 273 aa, Coffea canephora
MSTAKITPSATALSTTIKHLTCNLNLQNHARVRTLFTGAAYPTRTLRRTGFTVSMSAAAATEPVEVCVKASVTTPNKLGDCPFSQRVLLTLEEKHLPYDVKLVDFANKPDWFLQISPEGKVPVLKLEDKWIPDSDVITQAIEEKFPEPPLATPPEKASAGSKIFSKFIGFLRSKDPSDGTEKALLDELSAFNDYLKENGPLINGTEVSAADLSLGPKLYHLEISLGHYKNWSVPDSLTYLKSYMKAIFSLESFIKTRAQPEDVIEGWRPKVEG

SEQ ID NO: 1931 - DNA, 660 bp, Centaurea maculosa
atgtctaccaccaccaccaccactcctcttgaggtctgcgccaaagcttctctcactgtccccgataagcttggcgattgcccttttactcagagagttttgctgactctggaggagaagcaccttccttatgacctgaagttagttgatcttcgtaacaagccagaatggtttttaagtgttagcccagaaggtaaagttccagtggtgaagcttgatgacaaatggataccagattctgatgttattacacagtcagtggaggagaagttccctgagccatcattggtgactccacctgaaaaagcttctgttgggtcaaagatcttttccacatttgttggcttcctgaaaagcaaagatccagctgatggaacagagcaagctttactgaacgagctgtctgctttcaatgattacataaaagaaaatggcccatttatcaacggaaaggatatctctgctgcagacttgtcgcttatcccaaagctgtatcacttagagatcgctttgggtcatttcaagaagtggtccgttccagattcacttccccatctgaaatcctacatgaagagtgtgttctccctggagtcattcaccaaaacgatgccactgacagaagatgtgatcgagggatggagaccgaaagtcatgggttaa

SEQ ID NO: 1932 - protein, 219 aa, Centaurea maculosa
MSTTTTTTPLEVCAKASLTVPDKLGDCPFTQRVLLTLEEKHLPYDLKLVDLRNKPEWFLSVSPEGKVPVVKLDDKWIPDSDVITQSVEEKFPEPSLVTPPEKASVGSKIFSTFVGFLKSKDPADGTEQALLNELSAFNDYIKENGPFINGKDISAADLSLIPKLYHLEIALGHFKKWSVPDSLPHLKSYMKSVFSLESFTKTMPLTEDVIEGWRPKVMG

SEQ ID NO: 1933 - DNA, 789 bp, Citrus sinensis
atgtcgacgcttagaattcaaccaagcacaacaagtgcaatatcgtcaactataaagaacctgcaccttggcttctccttccgcctcccctgcaaaaactacggcgtttcgaagcgacctcggaacctctccgtgatggccgtggctacggatcctcttgaagtctgcgtcaaagcttcgtccgcttctcccaacagactcggcgactgtccattttgccaaagggtgttgttgactatcgaggaaaagcatctcccatatgacatgaagttggtagatttgggaaacaagccagaatggttcttaaaaattagccccgaaggtaaagttcctgttataaaactggatgagaagtggcttccagattcagatgttatcacacaatctctggaagaaaaatacccagatccgccactacgaaccccgcctgagaaggcttcagtcggatcaaagatcttctctatgtttattggttttctgaaaagcaaagaccccagtgatggatctgagcaggcattgctgaatgagctaaattcattcaatgattacatcaaggaaaatggcccttttatcattgggggaaaggtttctgctgcagatttgtccctgggacccaagttctatcatctagaaattgctctggggcattataaaaattggtcggttccagattcacttccacacgtgaagtcttacatgaagacaattttctcaatggattcatttatcaaaacaagagcactcccagatgatgtgattgttggttggcggccaaaggtctttggttag

SEQ ID NO: 1934 - protein, 262 aa, Citrus sinensis
MSTLRIQPSTTSAISSTIKNLHLGFSFRLPCKNYGVSKRPRNLSVMAVATDPLEVCVKASSASPNRLGDCPFCQRVLLTIEEKHLPYDMKLVDLGNKPEWFLKISPEGKVPVIKLDEKWLPDSDVITQSLEEKYPDPPLRTPPEKASVGSKIFSMFIGFLKSKDPSDGSEQALLNELNSFNDYIKENGPFIIGGKVSAADLSLGPKFYHLEIALGHYKNWSVPDSLPHVKSYMKTIFSMDSFIKTRALPDDVIVGWRPKVFG

SEQ ID NO: 1935 - DNA, 657 bp, Centaurea solstitialis
atgtctaccaccaccaccactcctcttgaggtctgcgccaaagcttctctcactgtccccgataagcttggcgattgcccttttactcagagagttttgctgactctggaggagaagcaccttccttatgacctgaagttagttgatattcataacaagccagaatggtttttaagtattagcccagaaggtaaagttccagtggtgaagcttgatgacaaatgggttccagattctgatgttattacacagtcagtggaggagaagttccctgagccatcattggtgactccacctgaaaaagcttctgttgggtcaaagatcttttctacatttgttggcttcctgaaaagcaaagacccagctgatggaacagagcaagctttactggatgagctgtctgctttcaatgattacataaaagaaaatggcccgtttatcaacggaaaggatatctctgctgcagacttgtcgcttatcccaaagctgtatcatttagagatcgctttgggtcatttcaagaagtggtccgttccagattcacttccccatctgaaatcctacatgaagaccgtgttctcgctggagtcattcaccaatacgatgccactgacagaagatgtgatcgagggatggcgaccaaaagtcatgggttaa

SEQ ID NO: 1936 - protein, 218 aa, Centaurea solstitialis
MSTTTTTPLEVCAKASLTVPDKLGDCPFTQRVLLTLEEKHLPYDLKLVDIHNKPEWFLSISPEGKVPVVKLDDKWVPDSDVITQSVEEKFPEPSLVTPPEKASVGSKIFSTFVGFLKSKDPADGTEQALLDELSAFNDYIKENGPFINGKDISAADLSLIPKLYHLEIALGHFKKWSVPDSLPHLKSYMKTVFSLESFTNTMPLTEDVIEGWRPKVMG

SEQ ID NO: 1937 - DNA, 654 bp, Carthamus tinctorius
atgtcgtctaccaccactcctgttgaggtctgcgccaaagcttctctcactgtccccgataggcttggcgattgcccttttactcagagagttttgctgactctggaggagaagcaccttccttatgacctgaagttagttgatattggtaacaagccagaatggtttttaagtattagcccagaaggtaaagttccagtggtgaagcttgatgacaaatggataccagattcagatgttattacacagtcagtggaggagaagttccctaacccaccattggtgactccacctgaaaaagcttctgttgggtcaaagatcttttctacatatattggcttcctgaaaagcaaagaccccgccgatggaacagagcaagctttactggacgagctgtctgctttcaatgattacataaaagaaaatggcccatttatcaatggaaaggatatctctgctgcagacttgtcgcttggcccaaagctgtatcatttagagatcgctttaggtcatttcaagaagtggtccgttccagattcacttccccatctgaaatcctacatgaagagcgtgttctccctggagtcattcaccaaaacgatgccactgacagaagatgtgatcgagggatggcgaccgaaagtcatgggttaa

SEQ ID NO: 1938 - protein, 217 aa, Carthamus tinctorius
MSSTTTPVEVCAKASLTVPDRLGDCPFTQRVLLTLEEKHLPYDLKLVDIGNKPEWFLSISPEGKVPVVKLDDKWIPDSDVITQSVEEKFPNPPLVTPPEKASVGSKIFSTYIGFLKSKDPADGTEQALLDELSAFNDYIKENGPFINGKDISAADLSLGPKLYHLEIALGHFKKWSVPDSLPHLKSYMKSVFSLESFTKTMPLTEDVIEGWRPKVMG

SEQ ID NO: 1939 - DNA, 789 bp, Gossypium hirsutum
atgtcgacggcagtagcattgtcttcctcacttaaacacaatttagctttgggcattcgattccctcaaaacccttccttttaccgtcgaaatggacccaaagtttcaacttttagaaccttcacagttgcaatggcggccagtaacactactcctcttgaaatctgcgttaaagcttctgtttccactcccaataagcttggcgactgccccttttgccaaagggtattgctgactatggaagaaaagcatcttccttatgaaatgaagttggtagatttgtcaaacaaaccagaatggttcttacaaatcagccccgaagggaaggttccggtagtgaaattcgatgagaaatgggttcctgattctgatgtcattgcgcagtcattggaagaaaagtatcccaatccaccattggtaactccgcaggaaaaagcattggttggctcgaagatcttctccacattcatcggttttcttaaaagcaaagatcctagcggtggaacagagcaagcattgcttgacgagttaagctcattcaatgattttatcaaagaaaacggtccttttatcaacagggagaagatttctgcggcggacttatctctagcgccaaagctataccatctcgagattgctttagggcattacaagaaatggtctattccggacacacttccctacacgaaatcttacatgaagacgattttctcgatggattcattcatgaaaacacgtgctagtcccgaagacgtaattgcgggttggcgtccaaaggttatgggttaa

SEQ ID NO: 1940 - protein, 262 aa, Gossypium hirsutum
MSTAVALSSSLKHNLALGIRFPQNPSFYRRNGPKVSTFRTFTVAMAASNTTPLEICVKASVSTPNKLGDCPFCQRVLLTMEEKHLPYEMKLVDLSNKPEWFLQISPEGKVPVVKFDEKWVPDSDVIAQSLEEKYPNPPLVTPQEKALVGSKIFSTFIGFLKSKDPSGGTEQALLDELSSFNDFIKENGPFINREKISAADLSLAPKLYHLEIALGHYKKWSIPDTLPYTKSYMKTIFSMDSFMKTRASPEDVIAGWRPKVMG

SEQ ID NO: 1941 - DNA, 780 bp, Glycine max
atgtccactgtgagagttcaagtttcggcgtgtgtgttttctgccaccgtcaacaacctttgcctccgccaaaacgccgtcgtttccttcagaaagaagaagcttctcagattggtctcaatgtcttccgttcctccttcccaacccttcgaaatcgccgttaaagcttccgtcaccacacccaacaggctcggcgactgccctttttgccaaagggtgttgctgacactggaggaaaaacatctaccttatgaccccaagttggtggatttgaccaacaagccagaatggttccttaaagtcaatcctgatggtaaagttcctgtcataaagtttgatgagaagtgggttcctgattcagatattattactcaaacattggaagagaagtatcccagccccccattgttgaccccacctgaaaaggccacggcggggtcaaagatcttttcaacatttattggttttctcaagagcaaggatcccaatgatggaacagaacaagcattacttagtgaactgagctctttcagtgattacatcaaggaaaatggtcctttcatcaacggtagtgagatatctgcagctgacctatcacttggaccaaagctataccatttagagattgctttggggcattataagaaatggacagtgcctgattcacttacctctttgaagtcttatatgaaggtcattttctcgagggaatcgttcgttaaaacaagtgcacaaccacaggatgtcattgaaggttggcgtcctaaagtggaaggctaa

SEQ ID NO: 1942 - protein, 259 aa, Glycine max
MSTVRVQVSACVFSATVNNLCLRQNAVVSFRKKKLLRLVSMSSVPPSQPFEIAVKASVTTPNRLGDCPFCQRVLLTLEEKHLPYDPKLVDLTNKPEWFLKVNPDGKVPVIKFDEKWVPDSDIITQTLEEKYPSPPLLTPPEKATAGSKIFSTFIGFLKSKDPNDGTEQALLSELSSFSDYIKENGPFINGSEISAADLSLGPKLYHLEIALGHYKKWTVPDSLTSLKSYMKVIFSRESFVKTSAQPQDVIEGWRPKVEG

SEQ ID NO: 1943 - DNA, 786 bp, Glycine max
atgtccgctgtgagagttcaagtttcggcgtgtgcggtttccgccaccgtcaaccaccttcgcctccgccaaaacgccgtcgtttccttcaggaagaagaagcctctcactctcagagtggtctcaatgtcttccgttcctccttcccaacccttcgaaatcgccgttaaagcttccgtcaccacacccaacaggctcggcgacggccctttttgccaaagggtgctgctgacactggaggaaaaacatctaccttatgaccccaagttggtggatttgaccaacaagccagaatggttccttaaagtcaaccctgatggtaaagttcctgtcataaagtttgatgagaagtgggttcctgattcagatgttattactcaaacattggaagagaagtatcccagcccaccattggtgaccccacctgaaagggccacaggggggtcaaagatcttttctacatttattggatttctcaagagcaaggatcccaatgatggaacagagcaagcattactaagtgaactgagctctttcaatgattacatcaaggaaaagggtcctttcatcaacggtagtgagatatctgcagctgacctatcacttggaccaaagctataccatttggagattgctttggggcattataagaaatggacagtgcctgattcacttacctctttgaagtcttatatgaaggccattttctcgagggaatcgttcgttaaaacaagtgcacaaccacaggatgtcattgaaggttggcgtcctaaagtggaaggctaa

SEQ ID NO: 1944 - protein, 261 aa, Glycine max
MSAVRVQVSACAVSATVNHLRLRQNAVVSFRKKKPLTLRVVSMSSVPPSQPFEIAVKASVTTPNRLGDGPFCQRVLLTLEEKHLPYDPKLVDLTNKPEWFLKVNPDGKVPVIKFDEKWVPDSDVITQTLEEKYPSPPLVTPPERATGGSKIFSTFIGFLKSKDPNDGTEQALLSELSSFNDYIKEKGPFINGSEISAADLSLGPKLYHLEIALGHYKKWTVPDSLTSLKSYMKAIFSRESFVKTSAQPQDVIEGWRPKVEG

SEQ ID NO: 1945 - DNA, 789 bp, Gossypium raimondii
atgtcgacggcagtagcattgtcttcctcacttaaacacaatttagctttgggcattcgattccctcaaaacccttccttttaccgtcgaaatggacccaaagtttcaacttttagaaccttcacagttgcaatggcggccattaacactactcctcttgaaatctgcgttaaagcttctgtttccactcccaataagcttggcgactgccccttttgccaaagggtattgctgactatggaagaaaagcatcttccttatgaaatgaagttggtagatttgtcaaacaaaccagaatggttcttacaaatcagccccgaagggaaggttccggtagtgaaattcgatgagaaatgggttcctgattctgatgtcattgcgcagtcattggaagaaaagtatcccaatccaccattggtaactccgcaggaaaaagcattggttggctcgaagatcttctccacattcatcggttttcttaaaagcaaagatcctagcggtggaacagagcaagcattgcttgacgagttaagctcattcaatgattatatcaaagaaaacggtccttttatcaacggggtgaagatttctgcggcggacttatctctagcgccaaagctataccatctcgagattgctttagggcattacaagaaatggtctattccggacacacttccctacacgaaatcttacatgaagacgattttctcgatggattcattcatgaaaacacgtgctagtcccgaagacgtaattgcgggttggcgtccaaaggttatgggttaa

SEQ ID NO: 1946 - protein, 262 aa, Gossypium raimondii
MSTAVALSSSLKHNLALGIRFPQNPSFYRRNGPKVSTFRTFTVAMAAINTTPLEICVKASVSTPNKLGDCPFCQRVLLTMEEKHLPYEMKLVDLSNKPEWFLQISPEGKVPVVKFDEKWVPDSDVIAQSLEEKYPNPPLVTPQEKALVGSKIFSTFIGFLKSKDPSGGTEQALLDELSSFNDYIKENGPFINGVKISAADLSLAPKLYHLEIALGHYKKWSIPDTLPYTKSYMKTIFSMDSFMKTRASPEDVIAGWRPKVMG

SEQ ID NO: 1947 - DNA, 765 bp, Helianthus annuus
atgtcggctattagaataaattcgcccactacggcgttgacgctttccatcaaacaccttacctgcaacccttttttccccaccaattgtcgccgtttcaagcgaaataccgtagccatgtcttccgctcctctccaagtctgcgccaaatcttctctcactgtccctaacaagctcggcgattgtccatttacacagagagttttgctgacactggaagagaagcatcttccttatgacctaaagttagttgatctcggtaacaagccagactggtttttaagtattagcccagaaggtaaagtcccagtggcgaaggttgatgacaaatggatagcagattccgatgttattacacagacagtagaggaaaagttccccgacccgtcactggtgaccccacctgagaaagcttctgtcgggtcgaagatcttttcgacatatattggcttcttaaaaagcaaagatgcgaatgatggaacggagcaagctttactgaatgaactctctgctttcaatgattacatcaaagaaaatggtccgtttatcaacggaaaggatatctctgctgcagacttgtcgctaggtccgaagctgtaccatatggagatcgctttgggtcattttaagaagtggtcagtcccggattcacttccccatctgaaaacatacatgaagactgtgttctcattggactcgttcatcaaaacaatgccgctaacagaagacgtaattgagggatggcggccaaaggtcatgggttaa

SEQ ID NO: 1948 - protein, 254 aa, Helianthus annuus
MSAIRINSPTTALTLSIKHLTCNPFFPTNCRRFKRNTVAMSSAPLQVCAKSSLTVPNKLGDCPFTQRVLLTLEEKHLPYDLKLVDLGNKPDWFLSISPEGKVPVAKVDDKWIADSDVITQTVEEKFPDPSLVTPPEKASVGSKIFSTYIGFLKSKDANDGTEQALLNELSAFNDYIKENGPFINGKDISAADLSLGPKLYHMEIALGHFKKWSVPDSLPHLKTYMKTVFSLDSFIKTMPLTEDVIEGWRPKVMG

SEQ ID NO: 1949 - DNA, 765 bp, Helianthus ciliaris
atgtctgctattagaataaattcgcccactacggcgttgacgctttccatcaaacaccttacctgcaacccttctttccccaccaattgtcgccgtttcaagcgaaatacagtcgccatgtcttccacccctctcgaagtctgcgccaaatcttctctcactgcccctaacaagctcggcgattgtccgtttacacagagagttttgctgacactggaagagaagcatcttccttatgacctaaagttagttgatctcggtaacaagccagactggtttttaagtattagcccagaaggtaaagtcccagtggcgaaggttgatgacaaatggatagcagattccgaagttattactcagacagtagaggaaaagttccccgacccgtcactggtgaccccacctgagaaagcttctgtcgggtcgaaaatcttttcgacatatattggcttcttaaaaagcaaagatgcgaatgatggaacggagcaagctttactgaatgaactctctgctttcaatgattacatcaaagaaaatggtccgtttatcaacggaaaggatatctctgctgcagacttgtcgctaggtccgaagctgtaccatatggagatcgcgttgggtcattataagaagtggtcagtcccggattcacttccccatctgaaaacatacatgaagactgtgttctcattggactcgttcatcaaaacaatgccgctaacagaagacgtgattgagggatggcggccaaaagtcatgggttaa

SEQ ID NO: 1950 - protein, 254 aa, Helianthus ciliaris
MSAIRINSPTTALTLSIKHLTCNPSFPTNCRRFKRNTVAMSSTPLEVCAKSSLTAPNKLGDCPFTQRVLLTLEEKHLPYDLKLVDLGNKPDWFLSISPEGKVPVAKVDDKWIADSEVITQTVEEKFPDPSLVTPPEKASVGSKIFSTYIGFLKSKDANDGTEQALLNELSAFNDYIKENGPFINGKDISAADLSLGPKLYHMEIALGHYKKWSVPDSLPHLKTYMKTVFSLDSFIKTMPLTEDVIEGWRPKVMG

SEQ ID NO: 1951 - DNA, 765 bp, Helianthus tuberosus
atgccggctattagaataaattcgcccactacggcgttgacgctttccatcaaacaccttacctgcaacccttctttccccaccaattgtcgccgtttcaagcgaaataccgtcgccatgtcttccgctcctctcgaagtctgcgccaaatcttctctcactgtccctaacaagctcggcgattgtccgtttacacagagagttttgctgacactggaagagaagcatcttccttatgacctaaagttagttgatctcggtaacaagccagactggtttttaagtattagcccagaaggtaaagtcccagtggcgaaggttgatgacaaatggatagcagattccgatgttattactcagacagtagaggaaaagttccccgacccgtcactggtgaccccacctgagaaagcttctgtcgggtcgaagatcttttcgacatatattggcttcttaaaaagcaaagatgcgaatgatggaacggagcaagctttactgaatgaactctctgctttcaatgattacatcaaagaaaatggtccgtttatcaacggaaaggatatctctgctgcagacttgtcgctaggtccgaagctgtaccatatggagatcgctttgggtcattataagaagtggtcagtcccggattcacttccccatctgaaaacatacatgaagactgtgttctcattggactcgttcatcaaaacaatgccgctaacagaagacgtgattgagggatggcggccaaaggtcatgggttaa

SEQ ID NO: 1952 - protein, 254 aa, Helianthus tuberosus
MPAIRINSPTTALTLSIKHLTCNPSFPTNCRRFKRNTVAMSSAPLEVCAKSSLTVPNKLGDCPFTQRVLLTLEEKHLPYDLKLVDLGNKPDWFLSISPEGKVPVAKVDDKWIADSDVITQTVEEKFPDPSLVTPPEKASVGSKIFSTYIGFLKSKDANDGTEQALLNELSAFNDYIKENGPFINGKDISAADLSLGPKLYHMEIALGHYKKWSVPDSLPHLKTYMKTVFSLDSFIKTMPLTEDVIEGWRPKVMG

SEQ ID NO: 1953 - DNA, 792 bp, Hordeum vulgare
atggctgtcctgctccgcaccaccagctgcgccgccgccacgaccgccggctcctcctcgaccctcctcgccacaaccttccgccgcgaccgccgcctcctcccgtcccgcgcttcgccggcgcgccgtgccttcactacccgcgcctcggccgaaccgctggaggtttgcgccaaggcctccatcaccgtccccgaccgcctcggcgattgtcctttcacgcagagagttttgttgacgatagaggagaaaaacctgccttatgaattaaaactagttgatcttgctaacaaaccagattggttatttaccattaacccagaaggtaaggtgcctattgtcaagctcgaggacaaatgggttgctgattctgatgttataacacaagtgttagaagaaaagtatcctcaaccatccttggcaactccaccagaaaaggcttcaatagggtcaaaaatattctccacattcattggctttctcaagagcaaagataccaatgatggaacagagcagacactactcagtgagctgacttcttttgatagctatctaaaagacaatggtccatttatcaatggtggaacaatttctgccgctgatctctctcttgctccgaaattatatcacatggagattgctctaggtcactataagaattggtctgtcccagatgcacttgcacatgtgaaaacatacatgaagactattttctcaatggattcatttgtcaatactcggggcctgccagaggatgttattgctggatggcgctcaaaagtcatgggttaa

SEQ ID NO: 1954 - protein, 263 aa, Hordeum vulgare
MAVLLRTTSCAAATTAGSSSTLLATTFRRDRRLLPSRASPARRAFTTRASAEPLEVCAKASITVPDRLGDCPFTQRVLLTIEEKNLPYELKLVDLANKPDWLFTINPEGKVPIVKLEDKWVADSDVITQVLEEKYPQPSLATPPEKASIGSKIFSTFIGFLKSKDTNDGTEQTLLSELTSFDSYLKDNGPFINGGTISAADLSLAPKLYHMEIALGHYKNWSVPDALAHVKTYMKTIFSMDSFVNTRGLPEDVIAGWRSKVMG

SEQ ID NO: 1955 - DNA, 813 bp, Ipomoea nil
atgtcgaccgtgaaaataacaccgtcggcgatttcacttcctgtcactatcaaacaactcgcctaccttcaccgcggacctagaattcggactcatttcgccgcaaacccgacccgtctcagagcccatggcctccgaagaggcatggtcgtcactgcaatgtcttcggcatcggaccctgtcgaagtatgcgctaaggcctccatcactattcccgacaggctaggcgactgtccctttactcagagggttttgttgactttagaggaaaagcatcttccttatgacttgaagctggttgacctaagtaacaaaccagagtggctgttcaaaattagcccggaagggaaggttcctgtggtgaagattgatgagaagtgggttccagattcagatgttatcacgcaggcgctggaagagaagttccctgatccatcgctgaaaacgccgccagagaaggcttctgttggatcaaagatcttcgccaagtttattgggtttctgaaaagcaaagaccctgctgatggaacggagcaagcattagtagaagagctgactgcttttaatgattaccttaaagaaaatggcccatttatcagtggaaatgaggtgtctgctgctgacttgtctctaggaccaaagctgtatcacatggagattgctctggggcactacaagaagtggtcagtcccagattcacttatctatctgaagtcgtacatgaaggacatattctcccgggattcctttgtcaaaacaagggcagtgacagaggatgtaattgaaggttggagaccaaaggtcgaggggtag

SEQ ID NO: 1956 - protein, 270 aa, Ipomoea nil
MSTVKITPSAISLPVTIKQLAYLHRGPRIRTHFAANPTRLRAHGLRRGMVVTAMSSASDPVEVCAKASITIPDRLGDCPFTQRVLLTLEEKHLPYDLKLVDLSNKPEWLFKISPEGKVPVVKIDEKWVPDSDVITQALEEKFPDPSLKTPPEKASVGSKIFAKFIGFLKSKDPADGTEQALVEELTAFNDYLKENGPFISGNEVSAADLSLGPKLYHMEIALGHYKKWSVPDSLIYLKSYMKDIFSRDSFVKTRAVTEDVIEGWRPKVEG

SEQ ID NO: 1957 - DNA, 786 bp, Lotus japonicus
atgtccacagccagagttcacgtgtcggcgctctccgccaccgtcaaccacctccgcctccgcccaaccaccgccgtttcacccaactgcttcaacacccattccaggaagcctctcagggtgtccatgtcttcagttcctccttcggaacccgtcgaaatcgccgttaaagcttctctcaccacacccaacaccctcggcgactgccccttttcccaaagggtattgttgacactggaggaaaaacatctaccttatgaggcgaagtttgtggatttaagcaacaagccagaatggttccttcaaatcagccccgaaggtaaagttcctgtgataaagtttgatgagaagtgggttccagattcagatattatcacacaaacattggaagagaagtatcctagcccaccattggtgaccccgcctgaaaagtctacagttggatcaaagattttttctacatttatcggatttctcaagagcaaagatcccaatgacggaacagagcaagcattactaagtgaactaagctccttcaatgattacctcaaggacaatggtccttttgtcaatgggaaagacatatctgcagcagacttgtcacttggaccaaagctataccatttggaaattgctttggggcattataagaaatggactgtaccagattcacttacctttctgaaatcttatatgaaggctattttctcaagggaatcattcattaaaacacgtgcacaaccacaggatgtcgttgaaggttggcgtcccaaagtggaaggctga

SEQ ID NO: 1958 - protein, 261 aa, Lotus japonicus
MSTARVHVSALSATVNHLRLRPTTAVSPNCFNTHSRKPLRVSMSSVPPSEPVEIAVKASLTTPNTLGDCPFSQRVLLTLEEKHLPYEAKFVDLSNKPEWFLQISPEGKVPVIKFDEKWVPDSDIITQTLEEKYPSPPLVTPPEKSTVGSKIFSTFIGFLKSKDPNDGTEQALLSELSSFNDYLKDNGPFVNGKDISAADLSLGPKLYHLEIALGHYKKWTVPDSLTFLKSYMKAIFSRESFIKTRAQPQDVVEGWRPKVEG

SEQ ID NO: 1959 - DNA, 798 bp, Lactuca virosa
atgtctgctattcgaatccatccgcctactacggcgttgacgacatctatcaaacaccttacctgcaacccaaataacctcaacctcttcaccaccaattctcgcaatttcaagcgttctgggttcagaagaaacctaacccccatcgccatgtcttccaaccctctcgaggtctgcgccaaatcgtctatcactgtccccaataggctcggcgactgtccttttactcagagagttttgttgactttggaggagaagcatcttccttacaatctcaaattaattgatcttgctaacaaaccagaatggtttctaagtattagcccagaaggtaaagttcctatcgtgaagcttgatgacaaatggatagcggattcagatgttattacacagacagtagaggagaagttccctgaaccaccattgttgactccacctgagaaagcttccattggatcaaagattttttcaacatatattggattcttgaaaagcaaagaccctaatgatggaaaagaagaagctttacttaatgagttatctgctttcaatgattacataaaagaaaatggcccatttattaatgggaaggatatatctggtgctgacttgtcacttggaccaaaattataccatttggagattgttttaggtcattataagaagtggtcaattccagattcacttcctcatctcaaaacctatatgaagactgtgttctcattggagtcattcacaaaaactatgccactcacagaagatgtaattgagggatggaggccaaaagtcatgggttaa

SEQ ID NO: 1960 - protein, 265 aa, Lactuca virosa
MSAIRIHPPTTALTTSIKHLTCNPNNLNLFTTNSRNFKRSGFRRNLTPIAMSSNPLEVCAKSSITVPNRLGDCPFTQRVLLTLEEKHLPYNLKLIDLANKPEWFLSISPEGKVPIVKLDDKWIADSDVITQTVEEKFPEPPLLTPPEKASIGSKIFSTYIGFLKSKDPNDGKEEALLNELSAFNDYIKENGPFINGKDISGADLSLGPKLYHLEIVLGHYKKWSIPDSLPHLKTYMKTVFSLESFTKTMPLTEDVIEGWRPKVMG

SEQ ID NO: 1961 - DNA, 798 bp, Malus domestica
atgtcgaccaccgccagaatccatccgacggcctccgctgtgctctccaccaccatcaaacaccaccttcggccgcctcccaacgctgtcgtattcagaaccaatcccaactccctgcggcgccgcggcaccacaagaaccctcacggtggcaatggccgcccctctcgacgtttgtgccaaggcttccgttactgttcccaacaagctcggcgactgtcccttctgtcaaagggtgttgctgacactagaggaaaagcatctcccttatgacctgaagttggtagacttgggcaacaagccagaatggttcttaaaaatttacccagaaggtaaagttcctgtggtaaaacttgatgagaagtgggttgcggattcagatattattacacaagcactggaagaaaaataccctgatccacctctggcaacgccccctgagaaggcttcagttggatcgaagatcttctctacatttatcggtttccttaagagcaaagatgccaaggatggaacagaagaagctttgctaaatgaacttaagtctttcgacgattatctcaaagaaaacggtccttttatcaatgggaaagtggtttctgctgctgatttttcacttggacccaagttgtatcatctagagattgctctggggcatttcaaagattggtcaattcccgattctcttccatatgtgaagtcttatatgaagagtatattctcactggattcattcgttaaagctagtgccctgaaagaagatgtcattgcgggttggcgtccaaaagtcttgggttaa

SEQ ID NO: 1962 - protein, 265 aa, Malus domestica
MSTTARIHPTASAVLSTTIKHHLRPPPNAVVFRTNPNSLRRRGTTRTLTVAMAAPLDVCAKASVTVPNKLGDCPFCQRVLLTLEEKHLPYDLKLVDLGNKPEWFLKIYPEGKVPVVKLDEKWVADSDIITQALEEKYPDPPLATPPEKASVGSKIFSTFIGFLKSKDAKDGTEEALLNELKSFDDYLKENGPFINGKVVSAADFSLGPKLYHLEIALGHFKDWSIPDSLPYVKSYMKSIFSLDSFVKASALKEDVIAGWRPKVLG

SEQ ID NO: 1963 - DNA, 795 bp, Medicago truncatula
atgtccaccgttagaattcaagtttcagcatgcgctctttccgccactgttaaccaccttcgttaccgtccaaactacgccgtttcaacaagctccttcaacaaccatttcagtattaaacccctcaaagtatcaatgtcttctgctcctccttctgagccattggaagttgctgttaaagcttctcttactacacctaacaagattggagactgcccttttagccaaagggtgttgctgacactggaggaaaaacatttaccttatgagccaaaattggtggatttaagaaacaaaccagaatggtttcttgaaatcagtcctgaaggtaaagttcccgtgataaattttgatggaaagtgggttgctgattcagatttaatcacacaaacattggaagagaagtatcctagcccaccattggtgacaccacctgaaaaggctacagctgggtcaaagatcttttctacatttattggatttctcaagagcaaagatcccaatgacggaactgaacaagcattactaaatgaactgagctccttcaacgattacctcaaggaaaatggtccttttatcaatgggaaagacatatctgcggctgacctatcactaggaccaaagctataccatttggagattgctttgggacattataagaaatggaccgtacctgattcgctgacctttttgaagtcttacttgaaggaaattttctcgagggaatcattcattaacacacgtgcacagccggaggatgtcattgaaggttggcgtcctaaagtagagggttga

SEQ ID NO: 1964 - protein, 264 aa, Medicago truncatula
MSTVRIQVSACALSATVNHLRYRPNYAVSTSSFNNHFSIKPLKVSMSSAPPSEPLEVAVKASLTTPNKIGDCPFSQRVLLTLEEKHLPYEPKLVDLRNKPEWFLEISPEGKVPVINFDGKWVADSDLITQTLEEKYPSPPLVTPPEKATAGSKIFSTFIGFLKSKDPNDGTEQALLNELSSFNDYLKENGPFINGKDISAADLSLGPKLYHLEIALGHYKKWTVPDSLTFLKSYLKEIFSRESFINTRAQPEDVIEGWRPKVEG

SEQ ID NO: 1965 - DNA, 759 bp, Nicotiana tabacum
atgtcgacagtgaagataacaccatcagcagctacactttcaacttctatcaaacactttgccaaaatccaacgccccaaatttatagcccccagaagagcttttactataatatcaatggcccctcttgaaatttgtgtcaaacaatcacttactacccctaacaagctcggcgactgcccgtttacgcagagggttttactgactttggaggaaaagaaccttccatatgacatgaagtatgttgatttgagaaacaagcctgaatggtttttgaagataagtcctgaaggtaaagttccacttataaagcttgatgagaaatgggttccggattcagatgtcatcacacaggcactcgaggagaagttccccgaacctccgctgacaactcctcccgagaaggcttccgttggatcaaagatctttccaaagtttgttgcttttctgaaaagcaaagacccgagtgatggaacagagcaggaattacttgatgagctgacagctttcaatgattaccttaaagaaaatggcccatttataaatggaaatgaggtatctgccgcggatctgtcgcttggaccaaagctataccatttagaaatagctttggggcattataagaattggtctgttccagattcatttccctacgtgaagtcgtacatgaagagtatattctccagggaatcattcatcaacacgcgggcgctaaaagaggatgtcattgagggttggcgaccaaaagtcatgggttag

SEQ ID NO: 1966 - protein, 252 aa, Nicotiana tabacum
MSTVKITPSAATLSTSIKHFAKIQRPKFIAPRRAFTIISMAPLEICVKQSLTTPNKLGDCPFTQRVLLTLEEKNLPYDMKYVDLRNKPEWFLKISPEGKVPLIKLDEKWVPDSDVITQALEEKFPEPPLTTPPEKASVGSKIFPKFVAFLKSKDPSDGTEQELLDELTAFNDYLKENGPFINGNEVSAADLSLGPKLYHLEIALGHYKNWSVPDSFPYVKSYMKSIFSRESFINTRALKEDVIEGWRPKVMG

SEQ ID NO: 1967 - DNA, 819 bp, Oryza sativa
atggccgtcctcctccgcaccaccacctccgctacgaccgccacgagcggcggctcctcctcggcgacggcgctcctcgccaccacgttccgacgcggcggcaggcgcctcctcctcctccccgcgacacgcggctcggcgccgcgccgcgcggccttactcacggctcgcgcctcggcggagccgctggaggtctgcgccaaggcctccctcaccgtccccgaccgcctcggcgactgtcctttcacacagagagtgttgttgacaatagaggagaagcatcttccgtatgatataaaactagttgatctcgctaacaaacctgattggtttctgaaaattagcccagaaggtaaggtgcctattgtcaagcttgaggaacaatgggttgctgattctgatgttattacacaagcgatagaagagaagtaccctgaaccatccttggcaactcctccagaaaaggcttcagtcgggtcaaaaatattttccacctttattggtttccttaaaagcaaagatccgaatgatggaacagaacaggcactgcttagtgagctgacttcattcgatagctatctaaaagacaatggtccatttattaacggtgaaacaatatctgctgctgatctctctcttgcccccaaactatatcacatggagatagctctaggtcactataagaattggtctgttccagattcactttcacatgtgaaaaaatatatgaagactatcttttcaatggattcatttgtcaagactatagctctgcaagaggatgtcattgctggatggcgcccaaaggtcatgggttaa

SEQ ID NO: 1968 - protein, 272 aa, Oryza sativa
MAVLLRTTTSATTATSGGSSSATALLATTFRRGGRRLLLLPATRGSAPRRAALLTARASAEPLEVCAKASLTVPDRLGDCPFTQRVLLTIEEKHLPYDIKLVDLANKPDWFLKISPEGKVPIVKLEEQWVADSDVITQAIEEKYPEPSLATPPEKASVGSKIFSTFIGFLKSKDPNDGTEQALLSELTSFDSYLKDNGPFINGETISAADLSLAPKLYHMEIALGHYKNWSVPDSLSHVKKYMKTIFSMDSFVKTIALQEDVIAGWRPKVMG

SEQ ID NO: 1969 - DNA, 813 bp, Populus trichocarpa
atgtcgactgcaagaatccaaccaacagtaacagcagcttgtgttctgtcttccacaatcaaacaccacttcggtttaacctctctccgactccctacgaaccactctgctgcttttagacgccaaagaatcaaaagaaacctcactgtttcaatgtccgctacttcagtttctgaacctcttgaaatctgtgtcaaagcttctcttactgtccctgataaacttggtgactgtcctttttgtcaaagggtattgcttactttggaggaaaagaatctgccttatgacatgaagtttgttgatttggggaacaaacctgaatggttcttgaaactaaacccagatggtaaagttcctgtgataaagtttgaggagaactgggtttcagattcagatgttatcacacaagcattggaagaaaagtttccagatccaccattggcaattccacctgaaaaggcttcagttggctcaaagatcttctccacatttattggatttcttaaaagcaaagaccctggtgatggaacagagcaggcattgctcgatgagcttagtgcttttaacgatcatatcaaagagaatggcccttttatcaacggggaaaaagtttctgcagctgatttggcccttggtccgaagctgtaccatctagagattgctcttgggcattataagaactggtcagttccagagtcacttccctacatcaaatcctacttgaaggaaatcttctccagggattcatttgttaacacacgtgctctgccagaggatgtcattgccggttggcgcccaaaagtcatgggttaa

SEQ ID NO: 1970 - protein, 270 aa, Populus trichocarpa
MSTARIQPTVTAACVLSSTIKHHFGLTSLRLPTNHSAAFRRQRIKRNLTVSMSATSVSEPLEICVKASLTVPDKLGDCPFCQRVLLTLEEKNLPYDMKFVDLGNKPEWFLKLNPDGKVPVIKFEENWVSDSDVITQALEEKFPDPPLAIPPEKASVGSKIFSTFIGFLKSKDPGDGTEQALLDELSAFNDHIKENGPFINGEKVSAADLALGPKLYHLEIALGHYKNWSVPESLPYIKSYLKEIFSRDSFVNTRALPEDVIAGWRPKVMG

SEQ ID NO: 1971 - DNA, 789 bp, Poncirus trifoliata
atgtcgacgcttagaattcaaccaagcacaacaagtgcaatctcgtcaactataaagaacctgcaccttggcttctccttccgcctccactgcaaaaactacggcgtttcgaagcgacctcggaacctctccgtgatggccgtggctacggatcctcttgaagtctgcgtgaaagcttcgcccacttctcccaacagactcggcgactgtccattttgccaaagggtgttgttgactatcgaggaaaagcatctcccatatgacatgaagttggtagatttgggaaacaagccagaatggttcttaaaaattagccccgaaggtaaagttcctgttataaaactggatgagaagtggcttccagattcagatgttatcacacaatctctggaagaaaaatacccagatccgccactaggaaccccgcctgagaaggcttcagttggatcaaagatcttctctacgtttattggttttctgaaaagcaaagaccccagtgatggatctgagcaggcattgctgaatgagctaaattcattcaatgattacatcaaggaacatggcccttttatcaatgggggaaaggtttctgctgcagatttgtccctgggacccaagttatatcatctagaaattgctctggggcattataaaaattggtcagttccagattcacttccacatgtgaagtcttacatgaagacaattttctcaatggattcatttatcaaaacaagagcactcccagatgatgtgattgttggttggcggccaaaggtctatggttag

SEQ ID NO: 1972 - protein, 262 aa, Poncirus trifoliata
MSTLRIQPSTTSAISSTIKNLHLGFSFRLHCKNYGVSKRPRNLSVMAVATDPLEVCVKASPTSPNRLGDCPFCQRVLLTIEEKHLPYDMKLVDLGNKPEWFLKISPEGKVPVIKLDEKWLPDSDVITQSLEEKYPDPPLGTPPEKASVGSKIFSTFIGFLKSKDPSDGSEQALLNELNSFNDYIKEHGPFINGGKVSAADLSLGPKLYHLEIALGHYKNWSVPDSLPHVKSYMKTIFSMDSFIKTRALPDDVIVGWRPKVYG

SEQ ID NO: 1973 - DNA, 825 bp, Ricinus communis
atgtcgacggcgagaattcaatcgatgccagcggcggccgtagctgcagcgacttgtgctttctcttgtacaatgatgaagcatcatcaccttcgttttcctcgaaacaacgccgttttgagagggcgcaaccgagcaagaaaaattgcaatgtctgctgtttcggatcctctagaagtctgtgtcaaagcttctattactgttcccaacaaacttggcgactgcccattttgccaaagagtgttgttgactatggaggaaaagcatgtcccttacgaaatgaagttggttgatttgtccaacaagccagaatggttcttgaaaataagcccggaaggtaaagttcctgtgataaaatttgaagagaagtgggtcccggattcagattttattacacagtcactagaagaaaagtttccagatcccccactaggaatcccaccagaaaaggcttcagttggctcgaagatcttctccacatttattggttttcttaaaagcaaagatgccagtgatgggacagagcaggcattactcaatgagctaagcgctttcaatgattatattaaagaaaatggcccttatattaatggagaaaaagtttctgctgctgatttggctcttggaccaaagctgtaccatctggaggtagctttggggcattataagaattggtcgattccagagtcactcccctatttcagatcttacatgaaagctattttctcactggattccttcattaaaacacgggctctcccagaagatgtcattgccggttggcgcccaaagtcatggggtaatgtttctccactgccactttag

SEQ ID NO: 1974 - protein, 274 aa, Ricinus communis
MSTARIQSMPAAAVAAATCAFSCTMMKHHHLRFPRNNAVLRGRNRARKIAMSAVSDPLEVCVKASITVPNKLGDCPFCQRVLLTMEEKHVPYEMKLVDLSNKPEWFLKISPEGKVPVIKFEEKWVPDSDFITQSLEEKFPDPPLGIPPEKASVGSKIFSTFIGFLKSKDASDGTEQALLNELSAFNDYIKENGPYINGEKVSAADLALGPKLYHLEVALGHYKNWSIPESLPYFRSYMKAIFSLDSFIKTRALPEDVIAGWRPKSWGNVSPLPL

SEQ ID NO: 1975 - DNA, 789 bp, Sorghum bicolor
atggccgtcctcctccgcggcacctccgccgccacctcgaccgttggtccctcctcggcgctgctcgccaccaccttccgccgctcccgcggccgccttctgccccgtgccgccccgcagcgccgcttgtatgtggcccgcgcctcggcccagccgctcgaggtctgcgccaaggagtccatcaccgtccctggccgcctcggagactgtcctttcacacagagggttttgttgactatagaggagaagcatctgccttatgaactgaagctagttgatctagctaataagccagattggttatttgaaatcaacccagaaggtaaagtgcctatcgtgaagcttgaggaaaaatggattggtgattctgatgttataacacagacattagaggagaagtatcctgaaccacccttggcaactccaccagaaaaggcttcagttgggtcaaaaatattttccactttcattggtttcctcaaaagcaaagatccaagcgatggaacagaagaggcactacttaatgagcttacttcatttgatagtcatctaaaagacaatggtccgtttattaatggcggaacaatttctgctgctgatctctctctgggccctaaactatatcacatggagatagctctgggccactataagaattggtctgttccagattcactttctcatgtaaaaacatacatgaagtcgattttctcaacggattcttttgtcaaaactcaagctctgccagaggatgtaattgctggatggcgcccaaaagtcatgggttaa

SEQ ID NO: 1976 - protein, 262 aa, Sorghum bicolor
MAVLLRGTSAATSTVGPSSALLATTFRRSRGRLLPRAAPQRRLYVARASAQPLEVCAKESITVPGRLGDCPFTQRVLLTIEEKHLPYELKLVDLANKPDWLFEINPEGKVPIVKLEEKWIGDSDVITQTLEEKYPEPPLATPPEKASVGSKIFSTFIGFLKSKDPSDGTEEALLNELTSFDSHLKDNGPFINGGTISAADLSLGPKLYHMEIALGHYKNWSVPDSLSHVKTYMKSIFSTDSFVKTQALPEDVIAGWRPKVMG

SEQ ID NO: 1977 - DNA, 807 bp, Solanum lycopersicum
atgtcgaccgcaaagataacaccgtcagctgcttcatttgcgacttctatcaaacaccttgcgggcattcaactacctcgatgccaaagcaccatttttacctccaattccacgaagttcagagcacccagaagaggttttactgtatcaatggcggcttcaatcgaaacccctcttgaagtatgcgtcaaacaatcaattacaactcctaacaagctcggtgactgcccattcacccagagggttttgcttacgttggaggagaaacaccttccatatgacatgaagtttgttgacttgagtaacaagcctgactggtttttgaagataagccctgaaggtaaagttcctcttattaagcttgacgagaaatgggtgccagattcagatgtcatctcacaggcactggaggagaagttccccaaacctccgctgacaactcctcctgagaaggcttccgtcggatcaaagattttccccaagtttgttgctttcctgaaaagcaaagactccggtgatggaacagagcaggctttacttgatgagctgacagctttcaatgattaccttaaagaaaatggtccatttatcaacggaaatgaggtatctgctgctgatttgtcgcttggaccaaagctatatcatttagaaatagctttggggaactataagaattggtctattccagattcactttcctacatgaaatcatacatgaagagtatattctccagggaatcattcatcaacacgcgggcactaaaagaggatgtcattgagggttggcgaccaaaagtcatgggttag

SEQ ID NO: 1978 - protein, 268 aa, Solanum lycopersicum
MSTAKITPSAASFATSIKHLAGIQLPRCQSTIFTSNSTKFRAPRRGFTVSMAASIETPLEVCVKQSITTPNKLGDCPFTQRVLLTLEEKHLPYDMKFVDLSNKPDWFLKISPEGKVPLIKLDEKWVPDSDVISQALEEKFPKPPLTTPPEKASVGSKIFPKFVAFLKSKDSGDGTEQALLDELTAFNDYLKENGPFINGNEVSAADLSLGPKLYHLEIALGNYKNWSIPDSLSYMKSYMKSIFSRESFINTRALKEDVIEGWRPKVMG

SEQ ID NO: 1979 - DNA, 801 bp, Spinacia oleracea
atgtcgaccgttaaaataacaccagtcgcgtattcactttcatcatcgaccctcaaacgccagctaatcccaaatccccaattccaccgccgcaatcgcaccattttcacccagcatttcaagaacggaacccaaagaaaccttactgtgtccatgtctagttcggacccactccaaatatgcgtcaaggaatctgtcaccacccccaacaagcttggcgattgtccattttgccaaagagtgttgttgactttagaagaaaagcatctcccttatgatatgaagctggtagacttaagtaacaagccagagtggtttacaaatatcaatccagatggtaaagtacctgtggtgaaattcgatgaaaattgggttgcagattcagatatcatcgcaaagtccctagaagagagatacccaaatccacctttggcaacacctgacgagaagagttcagttggctcaaaaatctttcctgcatttgttggttttattaaaagcaaggaccccagcgatggaaaagagcagggattactgaacgagctcagttccttcaatgattacctgaaagaaaatggaccttttatcaacggggagaagatctctgctgcggacctagctcttggaccaaagctttaccatatggagattgcattgggacattacaagaattggtcagttccagagtcacttccgtatgtgaagtcttatatgaagaatatattttccagggattcatttgtgaaaacaattgcatcaacagaggatgtgattgccggctgggcaaagcacacaagctga

SEQ ID NO: 1980 - protein, 266 aa, Spinacia oleracea
MSTVKITPVAYSLSSSTLKRQLIPNPQFHRRNRTIFTQHFKNGTQRNLTVSMSSSDPLQICVKESVTTPNKLGDCPFCQRVLLTLEEKHLPYDMKLVDLSNKPEWFTNINPDGKVPVVKFDENWVADSDIIAKSLEERYPNPPLATPDEKSSVGSKIFPAFVGFIKSKDPSDGKEQGLLNELSSFNDYLKENGPFINGEKISAADLALGPKLYHMEIALGHYKNWSVPESLPYVKSYMKNIFSRDSFVKTIASTEDVIAGWAKHTS

SEQ ID NO: 1981 - DNA, 807 bp, Solanum tuberosum
atgtcgacagtaaagataacaccatcagctgcttcatttgcgacttctatcaaacaccttgcgggcattcaactacctcgactccaaaacaccatttttacctccaattccactaagtttagagcacccagaagagcttttactgtatcaatggcggcttcactcgacacccctcttgaagtttgcgtcaaacaatcaatcacaactcctaacaagctcggcgactgcccattcactcagagggttttgcttacgttggaggaaaagcaccttccatatgacatgaagtttgttgatttaagtaacaagcctgactggtttttgaagataagccctgaaggtaaagttccacttattaagcttgacgagaaatgggttccagattcagatgtcatcacacaggcactggaggagaagttccctgaacctctgctgacaactcctcctgagaaggcttccattggatcaaagatcttcccgaagtttgttgcttttctgaaaagcaaagaccccactgatggaacagagcaggctttacttgatgagctgacagctttcaatgattaccttaaagaaaatggtccatttatcaacggaaatgaggtatctgctgctgatttgtcgcttggaccaaagctatatcatttagaaatagctttggggcactataagaattggtctattccagattcactttcctacgtgaaatcatacatgaagagtatattctccagggaatcattcatcaacacgcgggcactaaaagaggacgtcattgaaggttggcgaccaaaagtcatgggttag

SEQ ID NO: 1982 - protein, 268 aa, Solanum tuberosum
MSTVKITPSAASFATSIKHLAGIQLPRLQNTIFTSNSTKFRAPRRAFTVSMAASLDTPLEVCVKQSITTPNKLGDCPFTQRVLLTLEEKHLPYDMKFVDLSNKPDWFLKISPEGKVPLIKLDEKWVPDSDVITQALEEKFPEPLLTTPPEKASIGSKIFPKFVAFLKSKDPTDGTEQALLDELTAFNDYLKENGPFINGNEVSAADLSLGPKLYHLEIALGHYKNWSIPDSLSYVKSYMKSIFSRESFINTRALKEDVIEGWRPKVMG

SEQ ID NO: 1983 - DNA, 792 bp, Triticum aestivum
atggctgtcctcctccgcaccaccacctgcgccaccgccaccaccgccggctcctcctcgaccctcctcgccacaaccttccgccgcgtccgccgcctcctcccggcccgcgcttcgccgccgcgccgcgccttcactgcccgcgcctcggccgagccgctggaggtttgcgccaaggcctccatcaccgtccccgaccgcctcggcgactgtcctttcacgcagagagttttgctgacgatagaggagaaaaacctgccttacgaattaaaactagttgatcttgctaacaaaccagattggttgtttacaattaacccagaaggtaaggtacctattgtaaagctcgaggacaaatgggttgctgattctgatgttataacacaagtgttagaagaaaagtatcctcaaccatccttggcaactccaccagaaaaggcttcaatagggtcaaaaatattctccacattcattggctttctcaagagcaaagataccaacgatggaacagaacagacactacttagtgagctgacttcattcgatagttatctaaaagacaatggtccatttatcaatggtggaacaatttctgccgctgatctctctcttgctccgaaattatatcacatggagattgctcttggtcactataagaattggtctgtcccagatgcacttgcacatgtgaaaacatacatggagactattttctcaatggattcatttgtcaatactcggggcctgccagaggatgtcattgctggatggcgctcaaaagtcattggttaa

SEQ ID NO: 1984 - protein, 263 aa, Triticum aestivum
MAVLLRTTTCATATTAGSSSTLLATTFRRVRRLLPARASPPRRAFTARASAEPLEVCAKASITVPDRLGDCPFTQRVLLTIEEKNLPYELKLVDLANKPDWLFTINPEGKVPIVKLEDKWVADSDVITQVLEEKYPQPSLATPPEKASIGSKIFSTFIGFLKSKDTNDGTEQTLLSELTSFDSYLKDNGPFINGGTISAADLSLAPKLYHMEIALGHYKNWSVPDALAHVKTYMETIFSMDSFVNTRGLPEDVIAGWRSKVIG

SEQ ID NO: 1985 - DNA, 699 bp, Triphysaria sp.
atgtcatcggcgaaaatcgcaccgtcggccattaagcacttgtcgtcagttaaccctcgctctccactcgaagtctgcgccaaagaatctactactactcccaacaagcttggagactgcccatttacacaaagagttttgcttacattggaggaaaaacaccttccatatgacttaaaattggttgatttgagaaacaaaccagagtggctgttaaatataagcccagaaggtaaagttcccttgataaagcttgatgaaaagtggatacccgattccgatgttataacacaggcgcttgaagaaaagtttcctcaaccctcacttgcaacgccacccgagaaagcttcagttggctcaaagatcttctcgacatttattgggtttcttaaaagcaaagattccgatgatggaactgagctagcattactgaatgagctgggtgccttcaacaattacctcgagtacaatggcccatttatcaatggcaaagcgatatcggcagcagatttatctcttgcacctaagctctaccaccttgaagttgctttgggacactataaggagtggtctatccctccttcacttacctatctgaattcatacatgaagactgtattctcgatggattctttcgtgaaaacgcgagctgaaccacgagacgtgatcgagggttggcgaccaaaagtggaagcttga

SEQ ID NO: 1986 - protein, 232 aa, Triphysaria sp.
MSSAKIAPSAIKHLSSVNPRSPLEVCAKESTTTPNKLGDCPFTQRVLLTLEEKHLPYDLKLVDLRNKPEWLLNISPEGKVPLIKLDEKWIPDSDVITQALEEKFPQPSLATPPEKASVGSKIFSTFIGFLKSKDSDDGTELALLNELGAFNNYLEYNGPFINGKAISAADLSLAPKLYHLEVALGHYKEWSIPPSLTYLNSYMKTVFSMDSFVKTRAEPRDVIEGWRPKVEA

SEQ ID NO: 1987 - DNA, 657 bp, Triphysaria sp.
atgtgctcgaaagcaatggaaccactcgaagtctgcgccaaagaatctgctactactcccaacaagcttggcgactgcccattcacacaaagagttttgcttacattggaggaaaaacaccttccatatgacttaaaattggttgatttgagaaacaaaccggagtggctcttaaatataagcccagaaggtaaggttcccttgataaagcttgatgaaaagtggatacccgattccgatgttataacacaggcgcttgaagaaaagtttcccgaaccctcgcttgcaactccacccgacaaagcttcagttggctcgaagattttctcgacatttattgggtttcttaaaagcaaagactctgatgatggaactgagcaagcattactgaatgagttgggtgacttcaacaattacctcgaatacaatggcccgtttatcaatggcaaagcgatatcggcagcagatttatctcttgcacctaagctctaccaccttgaagttgctttgggacactataaggagtggtgtatcccaccttcacttacctatctgaattcatacatgaagactgtattctcgatggattcttttgtcaaaacacgagctgagccacgagacgtgatcgagggttggcgaccaaaagtcgaaggttga

SEQ ID NO: 1988 - protein, 218 aa, Triphysaria sp.
MCSKAMEPLEVCAKESATTPNKLGDCPFTQRVLLTLEEKHLPYDLKLVDLRNKPEWLLNISPEGKVPLIKLDEKWIPDSDVITQALEEKFPEPSLATPPDKASVGSKIFSTFIGFLKSKDSDDGTEQALLNELGDFNNYLEYNGPFINGKAISAADLSLAPKLYHLEVALGHYKEWCIPPSLTYLNSYMKTVFSMDSFVKTRAEPRDVIEGWRPKVEG

SEQ ID NO: 1989 - DNA, 792 bp, Vitis vinifera
atgtccagcgtgagaatacctcccacagcttcggctgtttcgtccaccatcaaacacctgggttacaatcccagatttttcacaagccatggaggagcaaaaggagtaaaaagagtaggaggagagagaagaaagtacagtattacaatgtcttctcctctcgaagtctgcgtcaaggcttccgtcataatccccaacaagctcggtgactgtcccttctcacaaaggattctgctgactctcgaggaaaaacatctcccttatgaaatgaagttggtagatttgactaacaagccagaatggttcttaaaaatcagtccaggcggtacagttcctgttatgaaacttgatgaaaaatggatagccgactcagatgtgattgctcagtccttggaagaaaagtacccagatccccctttgggaaccccacctgagaaggcttcagttgggtctaagatcttccctgcatttattggtttccttaaaagcaaagaccccagtgatgggacagagcagacattactgaacgagctagcttcttttgatgattatataaaagaaaatggcccttttatcaatgggaaagacatatctgctgttgacttgtctcttggaccaaaactataccatctagagattgctttggggcattacaagaagtggacggttccagattctcttccctttgtgaagtcttacatgaagaatatcttctccatggagtcttttgtcaagacccgaggtcttccagaggatgttattgctggatggcgtccaaaggtgatgagttaa

SEQ ID NO: 1990 - protein, 263 aa, Vitis vinifera
MSSVRIPPTASAVSSTIKHLGYNPRFFTSHGGAKGVKRVGGERRKYSITMSSPLEVCVKASVIIPNKLGDCPFSQRILLTLEEKHLPYEMKLVDLTNKPEWFLKISPGGTVPVMKLDEKWIADSDVIAQSLEEKYPDPPLGTPPEKASVGSKIFPAFIGFLKSKDPSDGTEQTLLNELASFDDYIKENGPFINGKDISAVDLSLGPKLYHLEIALGHYKKWTVPDSLPFVKSYMKNIFSMESFVKTRGLPEDVIAGWRPKVMS

SEQ ID NO: 1991 - DNA, 789 bp, Zea mays
atggccgtcctcctccgcagcacctccgccgccgcctcgactgctggcccctcctcggcgctgctcgccaccaccttccgccgctcccgcggctgccttctgccccgtgccgcgccgcagcgccgcttgtatgtggcccgcgcctcggcccagcccctcgaggtctgcgctaaggagtccatcaccatccctggccgcctcggagactgtcctttcacacagagggttttgttgactatagaggagaagcatctgccttatgatctgaagctagttgatctagctaataagccagattggttatttgaaatcaacccagaaggtaaagtgcctatcgtgaagctcgaggaaaaatggattggtgattctgatgttataacacaagcattagaggagaaataccctgaaccacccttggcaactccaccagaaaaagcttcagttggatcaaaaatattttccactttcattggtttcctcaaaagcaaagatccaagcgatggaacagaagaggcactacttaatgagcttacttcatttgatagttatctaaaagacaatggtccatttattaatggtggaataatttctgctgctgatctctctctgggtcctaaactatatcacatggagataactctgggccactacaagaattggtctgttccagattcactttcttatgtaaaaacatatatgaagtcgattttctcaatggattcttttgtcaaaactcaagctctgacagaggatgtaattgctggatggcgcccaaaagtcatgggttaa

SEQ ID NO: 1992 - protein, 262 aa, Zea mays
MAVLLRSTSAAASTAGPSSALLATTFRRSRGCLLPRAAPQRRLYVARASAQPLEVCAKESITIPGRLGDCPFTQRVLLTIEEKHLPYDLKLVDLANKPDWLFEINPEGKVPIVKLEEKWIGDSDVITQALEEKYPEPPLATPPEKASVGSKIFSTFIGFLKSKDPSDGTEEALLNELTSFDSYLKDNGPFINGGIISAADLSLGPKLYHMEITLGHYKNWSVPDSLSYVKTYMKSIFSMDSFVKTQALTEDVIAGWRPKVMG

SEQ ID NO: 1993 - DNA, 642 bp, Agrostis capillaris
atgactgtggaggtgttggtcaaggccgccgcaggagcccggacacgctcggcgactgtcccttcgcccagagggtgctgctcacgctggaggagaagaaggagccctacccagaccaagctcgtcgacctcagcaacaagcccgactggtttctggagatcaacccagagggaaaggtgcctgtgtttaatggaggtgatggtaaatggattgctgattccgatgtgattactcaggtcattgaggagaagtacccaactccatcacttgtcacccctcctgagtatgcatcagtgggctcaaagatcttctcaaccttcattgcgttcttgaagagcaaggatgccactgatggtacggagaaggcacttgttgacgagctgcaggcactcgacgagcacctaaaagctcatggcccatacatcaacggggagaatgtctcggctgtggatctggccctggccccaaagctcttccatctccaggttgccctggatcatttcaaaggctggaagatcccagaaaccctgaccagcgtccatgcctacaccgaggctctcttcagccgggaatcgttcgtgaagaccaagcccgccaaggagcacctgatcgccggatgggcgccgaaagtgaacccgtaa

SEQ ID NO: 1994 - protein, 213 aa, Agrostis capillaris
MTVEVLVKAAAGARTRSATVPSPRGCCSRWRRRRSPTQTKLVDLSNKPDWFLEINPEGKVPVFNGGDGKWIADSDVITQVIEEKYPTPSLVTPPEYASVGSKIFSTFIAFLKSKDATDGTEKALVDELQALDEHLKAHGPYINGENVSAVDLALAPKLFHLQVALDHFKGWKIPETLTSVHAYTEALFSRESFVKTKPAKEHLIAGWAPKVNP

SEQ ID NO: 1995 - DNA, 642 bp, Arabidopsis thaliana
atggctctggaaatctgtgtgaaagctgctgttggtgctcctgatcatctcggcgactgtccgttcagccaacgggctcttctcacactcgaggagaagagtcttacctacaaaatccatctgattaacctctctgacaaaccccagtggttcttggacattagtcctcaagggaaagtaccagtgcttaagatcgacgacaagtgggtgactgattccgacgtcatcgttggtatactcgaggagaagtatcctgatccaccactcaagactcctgctgaatttgcctctgttggatccaacatttttggtacttttgggacattcttgaagagcaaagactccaatgacggatctgaacatgccttgcttgttgagctagaagctttggaaaaccatcttaagagtcacgatggcccttttatcgccggagaaagagtttccgcagtggatctaagcttagcaccaaagctttaccaccttcaagttgctcttggccatttcaaaagctggtctgtccctgagagctttccccatgtccataactacatgaagactctgttctcgctcgactcttttgagaaaactaagaccgaggaaaagtatgtgatctctggatgggctcccaaggttaacccttga

SEQ ID NO: 1996 - protein, 213 aa, Arabidopsis thaliana
MALEICVKAAVGAPDHLGDCPFSQRALLTLEEKSLTYKIHLINLSDKPQWFLDISPQGKVPVLKIDDKWVTDSDVIVGILEEKYPDPPLKTPAEFASVGSNIFGTFGTFLKSKDSNDGSEHALLVELEALENHLKSHDGPFIAGERVSAVDLSLAPKLYHLQVALGHFKSWSVPESFPHVHNYMKTLFSLDSFEKTKTEEKYVISGWAPKVNP

SEQ ID NO: 1997 - DNA, 642 bp, Arabidopsis thaliana
atggctctagatatctgcgtgaaggttgccgtcggtgctcctgatgttctcggcgactgtccgtttagccaacgtgttcttctgacacttgaggagaagaagcttccctacaagacccatctgattaacgtctccgacaaaccccaatggttcttagacattagtccagaggggaaagttccggtggtgaagcttgatggcaaatgggtggctgattctgacgtaattgttggacttcttgaagagaaatatccagagccttctctcaagactcctcctgaatttgcttctgtaggatccaaaatctttggtgcttttgtgactttcttgaagagcaaagacgctaatgacggatccgagaaggctttggttgatgagttagaagcgttggagaatcacttgaagacacattctggtccttttgtagctggagagaagattactgcagtggatttgagtttagcaccaaagctttaccatcttgaggttgctcttggtcattacaagaactggtctgtccctgagagcttgaccagtgttcgtaactacgccaaggctttgttctctagggagtcgtttgagaacaccaaggctaagaaagagattgtggttgcgggttgggaatcgaaggtgaatgcgtga

SEQ ID NO: 1998 - protein, 213 aa, Arabidopsis thaliana
MALDICVKVAVGAPDVLGDCPFSQRVLLTLEEKKLPYKTHLINVSDKPQWFLDISPEGKVPVVKLDGKWVADSDVIVGLLEEKYPEPSLKTPPEFASVGSKIFGAFVTFLKSKDANDGSEKALVDELEALENHLKTHSGPFVAGEKITAVDLSLAPKLYHLEVALGHYKNWSVPESLTSVRNYAKALFSRESFENTKAKKEIVVAGWESKVNA

SEQ ID NO: 1999 - DNA, 654 bp, Arabidopsis thaliana
atgggcatcgaagtctgcgtgaaggccgcatcaggtgcacctgatgttctcggtgactgccctttcggtcaaaggatacttctcactctcgaggataagaaacttccttacaaaactcatctcatcgacgtttctctcaaaccggattggttcttggctattagtcccaagggaaaacttccattggtgaagttcgatgaagacgaaaattgggtggctgattccgaccttatagtgggaatcatcgaggagaaatatccggagccttctctcgtgacgtttcctcctgagtttgcatctgtgggctccaagatcattggtgcttttgtgatgtttttgacgagcaaagatcatgccaatgacgggtccgacatggctttgttggatgaacttgaggcgttagaccatcacctcaagactcacgttggtcctttcgtggcgggagataaagtaacggtcgtggatttgagcctagcaccaaagctttaccatctagagactacgttaggacatttcatggattggtgtgtccctgagagtctaactaatgtccgtgactacatgaaggtgttgttctctcttgagtcttttgagaaaactaaggctgccaaagaatatctgattgcaagttgggctcctaagctcgacgtgtga

SEQ ID NO: 2000 - protein, 217 aa, Arabidopsis thaliana
MGIEVCVKAASGAPDVLGDCPFGQRILLTLEDKKLPYKTHLIDVSLKPDWFLAISPKGKLPLVKFDEDENWVADSDLIVGIIEEKYPEPSLVTFPPEFASVGSKIIGAFVMFLTSKDHANDGSDMALLDELEALDHHLKTHVGPFVAGDKVTVVDLSLAPKLYHLETTLGHFMDWCVPESLTNVRDYMKVLFSLESFEKTKAAKEYLIASWAPKLDV

SEQ ID NO: 2001 - DNA, 642 bp, Aquilegia sp.
atggctttggaagtttgtgccaaagcagctgttggtgttcctgatgctcttggtgactgtccttttactcagagggttcttttaactcttgaagagaagaaagttccatataaacttcatttgattgatgttagcaacaaaccccaatggtttatggaagcgaatcctgaagggaaagtgccttgtgttaagtttgatggtaaatggactccagactctgatgtaatcactcagatccttgaggaaaaataccccgaaccatcgctcgttactcccccagagtattcttctgtgggatcaaatatattttcttcctttgttaagttcttaaagagcaaggatgcaagtgatggatctgaacaagctttggtagatgaactgaaagcattggaagatcatcttaaggagcatggtccttacgttaatggagagaatgtcagtgctgttgatttgagtttggcacctaaattataccatcttgtggttgctctaggccatttcaaagagtggtctatcccgaaagatttgacttatgtcaatagctatgttgagttgctttttgctcgggactcatttctaaagacaaagcctgagaaaaaggagtatgttattgcaggatgggcgcccaaggttaatggatga

SEQ ID NO: 2002 - protein, 213 aa, Aquilegia sp.
MALEVCAKAAVGVPDALGDCPFTQRVLLTLEEKKVPYKLHLIDVSNKPQWFMEANPEGKVPCVKFDGKWTPDSDVITQILEEKYPEPSLVTPPEYSSVGSNIFSSFVKFLKSKDASDGSEQALVDELKALEDHLKEHGPYVNGENVSAVDLSLAPKLYHLVVALGHFKEWSIPKDLTYVNSYVELLFARDSFLKTKPEKKEYVIAGWAPKVNG

SEQ ID NO: 2003 - DNA, 642 bp, Brassica napus
atggctctcgaagtctgcgtgaaagccgccgttggtgcccctgatgctctcggcgactgccctttcagccaacgggttctcctcaccctcgaggagaagaatcttccctacaaaatgcatctgatcaacatctccgacaaacctcaatggttcttagccattagtcctgaagggaaagtaccagtcctcaagaacgacgacaagtgggtgtctgattccgacgtcatcaccggcattctcgaggagaagtatcctgagccatctctcaagactcctcccgagctcgcctccgttggatccaaaatcttcggtaccttcgtgaccttcttgaagagcaaagactccagcgacggatccgagaaggccttgcttgatgagcttgaagctctcgagactcatctcaagactcatgacggtcctttcatcgccggagggaaagtcagtgctgtggatctaagcttagcaccgaagctttaccatctcaaggtcgctcttggccactacaaaagctggtctgtccccgagagcttgcctcatgttcatggctacatgaaggctttgttctctcttgactcgtttgagaaaacaaagactgaggagaggtatgttattgcaggatgggaacacaaggttaacccctaa

SEQ ID NO: 2004 - protein, 213 aa, Brassica napus
MALEVCVKAAVGAPDALGDCPFSQRVLLTLEEKNLPYKMHLINISDKPQWFLAISPEGKVPVLKNDDKWVSDSDVITGILEEKYPEPSLKTPPELASVGSKIFGTFVTFLKSKDSSDGSEKALLDELEALETHLKTHDGPFIAGGKVSAVDLSLAPKLYHLKVALGHYKSWSVPESLPHVHGYMKALFSLDSFEKTKTEERYVIAGWEHKVNP

SEQ ID NO: 2005 - DNA, 645 bp, Brassica napus
atggcggctcttgagatctgcgcgaagggtgcctttggtgctcctgatgttctcggtgactgcccgttcagccaacgggttcttctgaccctcgaagagaagaaacttccttacaagattcatctcgttaacgtctccgacaaaccccaatggtttttagacattagcccggaaggcaaagttccggtgatgaagcttgacggaaaatgggtggctgattcagacgtcatcgtcgggatcctcgaggagaaatatccagagccttctctcaagactcctcctgagttcgcctctgttggatccaaaatctttggttcttttgtgactttcttgacgagcaaagaccccagtgacggttccgacaaggctttggttaacgagttagaagccctggaaaatcaccttaagacacgtcctggtccttttgtagctggagagaaactcactgcggttgatttgagtttagcaccaaagctttaccatcttgagatggctcttggtcattacaagaaatggtctgtccctgagagtttgaccaattttcgtagctacgctaacgctttgttctctagagagtcgttcgagaaaaccaaagctaagaaggagttagtggtcgctggttgggcatctaaggtgaacaagtga

SEQ ID NO: 2006 - protein, 214 aa, Brassica napus
MAALEICAKGAFGAPDVLGDCPFSQRVLLTLEEKKLPYKIHLVNVSDKPQWFLDISPEGKVPVMKLDGKWVADSDVIVGILEEKYPEPSLKTPPEFASVGSKIFGSFVTFLTSKDPSDGSDKALVNELEALENHLKTRPGPFVAGEKLTAVDLSLAPKLYHLEMALGHYKKWSVPESLTNFRSYANALFSRESFEKTKAKKELVVAGWASKVNK

SEQ ID NO: 2007 - DNA, 642 bp, Brassica oleracea
atggctctcgaagtctgcgtgaaagccgccgttggtgcccctgatgctctcggcgactgccctttcagccaacgggttctcctcaccctcgaggagaagaatcttccctacaaaatgcatctgatcaacatctccgacaaacctcaatggttcttagccattagtcctgaagggaaagtaccagtcctcaagaacgacgacaagtgggtgtctgattccgacgtcatcaccggcattctcgaggagaagtatcctgagccatctctcaagactcctcccgagctcgcctccgttggatccaaaatcttcggtaccttcgtgaccttcttgaagagcaaagactccagcgacggatccgagaaggccttgcttgatgagcttgaagctctcgagactcatctcaagactcatgacggtcctttcatcgccggagggaaagtcagtgctgtggatctaagcttagcaccgaagctttaccatctcaaggtcgctcttggccactacaaaagctggtctgtccccgagagcttgcctcatgttcatggctacatgaaggctttgttctctctcgactcgtttgagaaaacaaagactgaggagaggtatgttattgcaggatgggaacacaaggttaacccctaa

SEQ ID NO: 2008 - protein, 213 aa, Brassica oleracea; identical to SEQ ID NO: 2004

SEQ ID NO: 2009 - DNA, 642 bp, Brassica rapa
atggctctcgaagtctgcgtgaaagccgccgttggtgcccctgatgctctcggcgactgccctttcagccaacgggttcttctcaccctcgaggagaagaatcttccctacaaaatgcatctgatcaacatctccgacaaacctcaatggttcttagccattagtcctgaagggaaagtaccagtcctcaagaacgacgacaagtgggtgtctgattccgacgtcatcaccggcatcctcgaggagaagtatcctgagccatctctcaagactcctcctgagttcgcctccgttggatccaaaatcttcggtactttcgtgactttcttgaagagcaaagactccagcgacggatccgagaaggccttgcttgatgagcttgaagctctggagactcatctcaagactcatgacggtcctttcatcgccggagggaaagtcagcgccgtggatctaagcttagcaccgaagctttaccatctcaaggtcgctcttggacactacaaaagctggtctgtccccgagagcttgcctcatgttcatggctacatgaaggctttgttctctcttgactcgtttgagaaaacaaagactgaggagaggtatgtgattgcaggatgggaacacaaggttaacccctaa

SEQ ID NO: 2010 - protein, 213 aa, Brassica rapa
MALEVCVKAAVGAPDALGDCPFSQRVLLTLEEKNLPYKMHLINISDKPQWFLAISPEGKVPVLKNDDKWVSDSDVITGILEEKYPEPSLKTPPEFASVGSKIFGTFVTFLKSKDSSDGSEKALLDELEALETHLKTHDGPFIAGGKVSAVDLSLAPKLYHLKVALGHYKSWSVPESLPHVHGYMKALFSLDSFEKTKTEERYVIAGWEHKVNP

SEQ ID NO: 2011 - DNA, 639 bp, Capsicum annuum
atgggtgttgaaatctgtgttaaggctgctgttggtgcacctaatgttcttggagactgtccctttagccaaagggcacttctgacattggaggaaaagaaagtgccttacaagatgatcttgatcaatgttagtgacaagcccaaatggttcttggaggtgaacccagaagggaaagttccggtgatcaattttggtgacaaatggatccctgattccgatgtcattgttgcgcttcttgaagagaaatacccaaatccctctctcgttactccccctgaatttgcctctgtgggctcgaaaatatttcctacgttcgtctcatttctgaagagcaaggattctagtgacggtaccgagcaagctctgctagatgaattaaacgctttggaagagcatctcaaggctcatggaccatatgtcaacgggcagaatatttgttcagttgatttgagcttggccccaaaactgtaccatctccaggtggctcttggccacttcaagaagtggagtgtgcctgaaagcttgagtcacgtgcataattacatgaagttgctcttcgagcgtgagtctttccagaaaaccaaggctgcagaagagtatgtcatcgccgggtgggctcctaaggtcaatccatga

SEQ ID NO: 2012 - protein, 212 aa, Capsicum annuum
MGVEICVKAAVGAPNVLGDCPFSQRALLTLEEKKVPYKMILINVSDKPKWFLEVNPEGKVPVINFGDKWIPDSDVIVALLEEKYPNPSLVTPPEFASVGSKIFPTFVSFLKSKDSSDGTEQALLDELNALEEHLKAHGPYVNGQNICSVDLSLAPKLYHLQVALGHFKKWSVPESLSHVHNYMKLLFERESFQKTKAAEEYVIAGWAPKVNP

SEQ ID NO: 2013 - DNA, 642 bp, Citrus aurantium
atggccgtggagatttgtgtgaaagccgctgttggcgctcctgatattctcggggactgcccattttcccaaagagctttgcttactttggaggaaaagaaagttccatacaagcgtcacctgatcaatatcagtgacaagcctcaatggtttatggagataagcccagaagggaaagtacctgtggtaaagtttgatgacaagtgggtggctgactctgatgtgattgttagaattgttgaggagaagtatcctgagccttctcttaccaatcctcctgaatttgcctctcttggatcaaagatattcccatcttttgtcaatttcttgaagagcaaggacccaaatgatgggacagagcaagctttgctggaggaattgaaagcattggatgagcatcttaagacccatggaggtccattcattgctggagagaaggtcactgctgtagatttgagcttggcaccaaagctgtaccaccttcaggtagctcttgaacatttcaagcagtggactgtccctgagagcttggctcatgtccatgggtacacgaagaagctttttgccctggaatcctttcagaagactaaggctgaaaagcaatacgtgattgcaggatgggtgccgaaggtcaatgcatga

SEQ ID NO: 2014 - protein, 213 aa, Citrus aurantium
MAVEICVKAAVGAPDILGDCPFSQRALLTLEEKKVPYKRHLINISDKPQWFMEISPEGKVPVVKFDDKWVADSDVIVRIVEEKYPEPSLTNPPEFASLGSKIFPSFVNFLKSKDPNDGTEQALLEELKALDEHLKTHGGPFIAGEKVTAVDLSLAPKLYHLQVALEHFKQWTVPESLAHVHGYTKKLFALESFQKTKAEKQYVIAGWVPKVNA

SEQ ID NO: 2015 - DNA, 651 bp, Coffea canephora
atggctgattctaagccagtggaggtctgtgtaaaagctgctgctggtgcccctgatattcttggagactgcccattttgccataggatacttttgaccctggaggtaaagaaagtaccttacaagttgcacctaatcaatactgatgacaagccacaatggttcttggctgtgaacccagaagggaaggtgccagtgatcaaatttgatgacaaatggatttctgactctgatgtgatagttgggatcattgcagagaaatacccagaaccccctctgtctgctcctcctgaagcctcctctgtggcttcaaagatattccctgcttttgtcaagtttctaaagagcaaggatcccaatgatgggacagagcaagctctactagaagaactgaaggcattagatgaacacctcaaagctcatggaccatatatcaatggcgaaaagatatctgctgttgatttgagtttggcacctaaactgtaccatcttgaaacaactcttgaccatttcaagggctggaaaatccctgaaaacttggctcatttacataactacataaagctggttttttcttgggagacttttgacaaaaccaaggctgcaaaagaacatgtgattgctggatggaagccaaaggttgaggcgtga

SEQ ID NO: 2016 - protein, 216 aa, Coffea canephora
MADSKPVEVCVKAAAGAPDILGDCPFCHRILLTLEVKKVPYKLHLINTDDKPQWFLAVNPEGKVPVIKFDDKWISDSDVIVGIIAEKYPEPPLSAPPEASSVASKIFPAFVKFLKSKDPNDGTEQALLEELKALDEHLKAHGPYINGEKISAVDLSLAPKLYHLETTLDHFKGWKIPENLAHLHNYIKLVFSWETFDKTKAAKEHVIAGWKPKVEA

SEQ ID NO: 2017 - DNA, 642 bp, Citrus clementina
atggccgtggagatttgtgtgaaagccgctgttggcgctcctgatattctcggggactgcccattttcccaaagagctttgcttactttggaggaaaagaaagttccatacaagcgtcacctcatcaatatcagtgacaagcctcaatggtttttggagataagcccagaagggaaagtacctgtggtaaagtttgatgacaagtgggtggctgactctgatgtgattgttagaattattgaggagaagtatcctgagccttctcttactaatcctcctgaatttgcctctgttggatcaaagatattcccatcttttgtcaatttcttgaagagcaaggacccaaatgatgggacagagcaagctttgctggaggaattgaaagcattggatgagcatcttaagactcatggaggtccattcattgctggagagaaggtcactgctgtagatttgagcttggcaccaaagctgtaccaccttcaggtagctcttgaacatttcaagcagtggactgtccctgagagcttggctcatgtccatgggtacacgaagaagctttttgctctggaatcctttcaaaagactaaggctgaaaagcaatacgtgattgcaggatgggtgccgaaggtcaatgcatga

SEQ ID NO: 2018 - protein, 213 aa, Citrus clementina
MAVEICVKAAVGAPDILGDCPFSQRALLTLEEKKVPYKRHLINISDKPQWFLEISPEGKVPVVKFDDKWVADSDVIVRIIEEKYPEPSLTNPPEFASVGSKIFPSFVNFLKSKDPNDGTEQALLEELKALDEHLKTHGGPFIAGEKVTAVDLSLAPKLYHLQVALEHFKQWTVPESLAHVHGYTKKLFALESFQKTKAEKQYVIAGWVPKVNA

SEQ ID NO: 2019 - DNA, 639 bp, Cichorium intybus
atggcgattgagatctgttgcaaagctgctaccggcgctcctgaaattctcggagactgtccattttgtcaaagggttcttttgactctcgaagagaagaaagtcgcttacaagacccatcttattaatctggactgcaaacccgaatggtttcttgcagtgaacccagacgggaaagttccgttgataaaattcgatgacaaatggatttctgattctgatgttattgtgggtctgattgaagagaagtttcctgaaccttcactttcttctccccctgaattcgcctctgtggggtcaaagattttcccaaagttcgtgacattcttaaagagcaaagatgcgaatgatggaaccgagcaagctttacttgatgagttgaagtcattggatgaacacctcaagaatcacgggccttatgtgaacggagaaaagatcacagccgtcgatttgagtttggccccaaagctgtaccaccttgaggtcgctcttggtcattttaagaagtggactgtccctgaaagtttcactcatgtgcataactacacaaagtctttgtttggccgggagtcgtttgagaaaaccaaagctgctaaagaatatgttattgctggatgggcaccaaaggttaatgcatga

SEQ ID NO: 2020 - protein, 212 aa, Cichorium intybus
MAIEICCKAATGAPEILGDCPFCQRVLLTLEEKKVAYKTHLINLDCKPEWFLAVNPDGKVPLIKFDDKWISDSDVIVGLIEEKFPEPSLSSPPEFASVGSKIFPKFVTFLKSKDANDGTEQALLDELKSLDEHLKNHGPYVNGEKITAVDLSLAPKLYHLEVALGHFKKWTVPESFTHVHNYTKSLFGRESFEKTKAAKEYVIAGWAPKVNA

SEQ ID NO: 2021 - DNA, 663 bp, Curcuma longa
atggcagccgtcgtctctgataaagccgtcgaggtctgcgtgaaggccgccgtcggcgcaccggacaccctcggcgactgtccttttagtcatagggtgctcctcacgctagaggagaagaagattccctacgatctgaagttgatcgatgttagcaacaagccagattggttcttggctattagcccagaaggtaaggttccggtgctgaaggcggatgatgaccagtgggttcccgattcagatgtcatcacccaaattttggaggagaaatatccgaaccctccgctcgttgctccccaggagtactcgtcagtgggatcaaaaatcttttcttcttttgttaagttcttgaagagcaaagatgccaatgatggatcggaacaagctctgattgatgagctacaggcattggatgaacatcttaaagctcatggcccatatatcaatggtgacaacatttctgctgttgacttgagcttggcacctaagttgttccatctagtggtagcgcttgatcatttcaaaggatggaaggtcccagagaatctttcctatgttcatgcttacatgaagaacctttttgaacgggaatctttctgcaagaccaaggctgcaaaggagcatgtgattgctggatgggcaccaaaagtgaatgcttga

SEQ ID NO: 2022 - protein, 220 aa, Curcuma longa
MAAVVSDKAVEVCVKAAVGAPDTLGDCPFSHRVLLTLEEKKIPYDLKLIDVSNKPDWFLAISPEGKVPVLKADDDQWVPDSDVITQILEEKYPNPPLVAPQEYSSVGSKIFSSFVKFLKSKDANDGSEQALIDELQALDEHLKAHGPYINGDNISAVDLSLAPKLFHLVVALDHFKGWKVPENLSYVHAYMKNLFERESFCKTKAAKEHVIAGWAPKVNA

SEQ ID NO: 2023 - DNA, 639 bp, Centaurea maculosa
atggcgattgagatctgcgtcaaagctgctacgggtgctcctgatgttcttggagactgtccattttcccaaagggttcttttgactctggaagagaagaaagtcccttacaagacccatcttattaatttggacaacaaacctgaatggtttgctaaagtgaacccagatgggaaagttcccttaatgaaatctgatgagaaatggatttctgattcagatgttattgtgggtcttattgaagacaagtaccctcaaccttctctttctcctccacctcaacttgcctctgtggggtcgaagattttccccaagtttgtgacattcttaaagagcaaggatgccaatgatgggacggaacaagctttacttgatgagttgaaggcgttggacgaacacctcaagaatcacgggccttatgtcaatggagagaagattacagccgttgatctgagtttggcaccaaaactctaccatctcgaggtggcacttggtcattacaagaagtgggccatccctgaaagcctaactcatgtgcataactacataaagttgctgttctctagagagtcgtttaagaaaacgcatgctgctaaagaatacgttattgctggatgggcgtcaaaggttaatgcatga

SEQ ID NO: 2024 - protein, 212 aa, Centaurea maculosa
MAIEICVKAATGAPDVLGDCPFSQRVLLTLEEKKVPYKTHLINLDNKPEWFAKVNPDGKVPLMKSDEKWISDSDVIVGLIEDKYPQPSLSPPPQLASVGSKIFPKFVTFLKSKDANDGTEQALLDELKALDEHLKNHGPYVNGEKITAVDLSLAPKLYHLEVALGHYKKWAIPESLTHVHNYIKLLFSRESFKKTHAAKEYVIAGWASKVNA

SEQ ID NO: 2025 - DNA, 642 bp, Citrus reticulata
atggccgtggagatttgtgtgaaagccgctgttggcgctcctgatattctcggggactgcccattttcccaaagagctttgcttactttggaggaaaagaaagttccatacaagcgtcacctcatcaatatcagtgacaagcctcaatggtttttggagataagcccagaagggaaagtacctgtggtaaagtttgatgacaagtgggtggctgactctgatgtgattgttagaattattgaggagaagtatcctgagccttctcttactaatcctcctgaatttgcctctgttggatcaaagatattcccatcttttgtcaatttcttgaagagcaaggacccaaatgatgggacagagcaagctttgctggaggaattgaaagcattggatgagcatcttaagactcatggaggtccattcattgctggagagaaggtcactgctgtagatttgagcttggcaccaaagctgtaccaccttcaggtagctcttgaacatttcaagcagtggactgtccctgagagcttggctcatgtccatgggtacacgaagaagctttttgctctggaatcctttcagaagactaaggctgaaaagcaatacgtgattgcaggatgggtgccgaaggtcaatgcatga

SEQ ID NO: 2026 - protein, 213 aa, Citrus reticulata; identical to SEQ ID NO: 2018

SEQ ID NO: 2027 - DNA, 642 bp, Citrus sinensis
atggccgtggagatttgtgtgaaagccgctgttgccgctcctgatattctcggggactgcccattttcccaaagagctttgcttactttggaggaaaagaaagttccatacaagcgtcacctcatcaatatcagtgacaagcctcaatggtttttggagataagcccagaagggaaagtacctgtggtaaagtttgatgacaagtgggtggctgactctgatgtgattgttagaattattgaggagaagtatcctgagccttctcttactaatcctcctgaatttgcctctgttggatcaaagatattcccatcttttgtcaatttcttgaagagcaaggacccaaatgatgggacagagcaagctttgctggaggaattgaaagcattggatgagcatcttaagactcatggaggtccattcattgctggagagaaggtcactgctgtagatttgagcttggcaccaaagctgtaccaccttcaggtagctcttgaacatttcaagcagtggactgtccctgagagcttggctcatgtccatgggtacacgaagaagctttttgctctggaatcctttcagaagactaaggctgaacagcaatacgtgattgcaggatgggtgccgaaagtcaatgcatga

SEQ ID NO: 2028 - protein, 213 aa, Citrus sinensis
MAVEICVKAAVAAPDILGDCPFSQRALLTLEEKKVPYKRHLINISDKPQWFLEISPEGKVPVVKFDDKWVADSDVIVRIIEEKYPEPSLTNPPEFASVGSKIFPSFVNFLKSKDPNDGTEQALLEELKALDEHLKTHGGPFIAGEKVTAVDLSLAPKLYHLQVALEHFKQWTVPESLAHVHGYTKKLFALESFQKTKAEQQYVIAGWVPKVNA

SEQ ID NO: 2029 - DNA, 639 bp, Centaurea solstitialis
atggcgattgagatctgcgtcaaagctgctacgggtgctcctgatgttcttggagattgtccattttcccaaagggttcttttgactctggaagagaagaaggtcccttacaagacccatcttattaatttggacaacaaacctgaatggtttgctgaagtgaacccagatgggaaagttcccttgatgaaatctgatgagaaatggatatctgattcagatgttattgtgggtcttattgaagacaagtaccctcaaccttctctttctcctccacctcaacttgcctctgtggggtcgaagattttccccaagtttgtgacattcttaaagagcaaggatgccaatgatgggacggaacaagctttacttgatgagttgaaggcgttggacgaacacctcaagaatcacgggccttatgtcaatggagagaagattacagccgttgatctgagtttggcaccaaaactctaccatctcgaggtggcacttggtcattacaagaagtgggccatccccgaaagcctaactcatgtgcataactacatgaagttgctgttctctagagagtcgtttaagaaaacgcatgctgctaaagaatatgttgttgctggatgggcgtcaaaggttaatgcatga

SEQ ID NO: 2030 - protein, 212 aa, Centaurea solstitialis
MAIEICVKAATGAPDVLGDCPFSQRVLLTLEEKKVPYKTHLINLDNKPEWFAEVNPDGKVPLMKSDEKWISDSDVIVGLIEDKYPQPSLSPPPQLASVGSKIFPKFVTFLKSKDANDGTEQALLDELKALDEHLKNHGPYVNGEKITAVDLSLAPKLYHLEVALGHYKKWAIPESLTHVHNYMKLLFSRESFKKTHAAKEYVVAGWASKVNA

SEQ ID NO: 2031 - DNA, 639 bp, Cyamopsis tetragonoloba
atggctctcgaggttgctgtcaaggctgctgttggtgctcctaacattctcggagactgtccattttcgcaaagggtcctcttaactttcgaggagaagaaaatcccacacaagatccacctcatcgatctcagcagcaaaccccaatggtttttggaagtgaaccctgaaggcaaagtgccggtggttcagtttgatggcaagtgggtgtctgattctgatgttattgttgggattctcgaggaaaaataccctgagccctccctcgccactcctccgggattttcctccgtgggatcaaagatatttgggtctttcgtgagttttctaaagagtaaggatcccaatgatggaacagagcaagcgctggttgctgaattgaaggctttggatgaacatcttaaagcccatggtccatatgttgctggggagaaaatttccgctgttgatttgagtttggcaccaaaactgtaccatctagtggtagcacttggccacttcaagaaatggtctattcctgaaagcttgtcacatgtccacaactacatcaagctgctgttctcccgggaatcatttgagaaaaccaaggctgcggaggaatatgttattgctggatgggcaccaaaggtgaatgcatga

SEQ ID NO: 2032 - protein, 212 aa, Cyamopsis tetragonoloba
MALEVAVKAAVGAPNILGDCPFSQRVLLTFEEKKIPHKIHLIDLSSKPQWFLEVNPEGKVPVVQFDGKWVSDSDVIVGILEEKYPEPSLATPPGFSSVGSKIFGSFVSFLKSKDPNDGTEQALVAELKALDEHLKAHGPYVAGEKISAVDLSLAPKLYHLVVALGHFKKWSIPESLSHVHNYIKLLFSRESFEKTKAAEEYVIAGWAPKVNA

SEQ ID NO: 2033 - DNA, 639 bp, Carthamus tinctorius
atggcgattgagatctgcgtcaaagctgctacgggtgctcctgatgtccttggagattgtccattttcccaaagggttcttttgactctggaagagaagaaagtcccttacaagacccatcttattaatttggatgccaaacctgaatggtttgctaaagtgaacccagatgggaaagttcccttgttgaaatctgaggagaaatggatttctgattcagatgttattgtgggtcttattgaagacaagtaccctcaaccttctctttctcctcccccccaactcgcctctgtggggtcgaagatcttcccaaactttgtggcattcttaaagagcaaggatgccaatgatggaacggagcaagcgttagttaacgagttgaaggcgttggacgaacacctcaagaataacgggccttatgtcaacggagagaagatcacagccgttgatctgagtttggcaccaaaactctaccatctccaggtggcactcggtcattacaagaagtggaccatccccgaaagcctacctcatgtgcataactacataaagttgctgttctctagagagtcgtttaagaaaacaagcgctgctaaggagtaccttgttgctggatgggcatcgaaggttaatgcatga

SEQ ID NO: 2034 - protein, 212 aa, Carthamus tinctorius
MAIEICVKAATGAPDVLGDCPFSQRVLLTLEEKKVPYKTHLINLDAKPEWFAKVNPDGKVPLLKSEEKWISDSDVIVGLIEDKYPQPSLSPPPQLASVGSKIFPNFVAFLKSKDANDGTEQALVNELKALDEHLKNNGPYVNGEKITAVDLSLAPKLYHLQVALGHYKKWTIPESLPHVHNYIKLLFSRESFKKTSAAKEYLVAGWASKVNA

SEQ ID NO: 2035 - DNA, 642 bp, Descurainia sophia
atggctctagaaatctgcgtgaaagctgctgttggtgcccctgatcacctcggcgactgtcctttcagccaacgagctcttctcacgctcgaggagaagagtcttacttacaaaatccatctcattaacatctctgacaaaccccagtggttcttagacattagtcctcaagggaaagtaccagtgcttaagatcgatggcaagtgggtgtctgattccgaagtcatcgtcggtattctcgaggaaaagtatcctgatccacctctcaagactcctccccagtttgcctctgttggatccaacattttcggtactttcgcgactttcgtgaagagcaaagactctcatgacggatctgaaaaggccttgctaactgagctagaagctttggagaaccatctcaagagtcacgaaggtccttttatcgccggggaaagagtttccgctgtggatctaagcttagcaccaaagctttaccatctccaagtcgctcttggccatttcaaaagctggtctgtcccggcgagcttgcaacatgtccataactacatgacagctttgttctctcttgaatcctttgagaaaactaagacagaggagaagtatgtgatctcaggatgggctcccaaggtcaacccttga

SEQ ID NO: 2036 - protein, 213 aa, Descurainia sophia
MALEICVKAAVGAPDHLGDCPFSQRALLTLEEKSLTYKIHLINISDKPQWFLDISPQGKVPVLKIDGKWVSDSEVIVGILEEKYPDPPLKTPPQFASVGSNIFGTFATFVKSKDSHDGSEKALLTELEALENHLKSHEGPFIAGERVSAVDLSLAPKLYHLQVALGHFKSWSVPASLQHVHNYMTALFSLESFEKTKTEEKYVISGWAPKVNP

SEQ ID NO: 2037 - DNA, 642 bp, Eleusine coracana
atggccgtggaggtgtgcgtgaaggccgccgtcgggcaccccgacacgctcggcgactgtcctttctcccagagggtgctgctcacgctgcaggagaagaaggtcccctacgagatgaagctcatcgacgtcagcaacaagcccgactggttcctgaagatcaacccagagggcaaggtgcctgtgtttaacggtggtgatggcaaatggattgctgattctgatgtgatcgttcaagttattgaggagaagtacccaactccacctcttgtaactcctcctgaatatgcatcagtgggatcaaagattttctcaacctttgtcacgttcttgaagagcaaggattcgaatgatggttcagagcaggcacttctcactgaactgcaggcactagaggagcacctcaaagctcatggcccctatatcaacgggcagaatgtatcagctgttgatcttagcctggcaccaaagctctaccacctcacggttgcactggaccatttcaagggctggaagatcccggaaaatctcacgaacgtccatgcatacgtcaaggctcttttcagccgtgaatcttttgagaagactaaggcggctaaggagcacgtgatcgcaggatgggcgcccaaggtgaatgcataa

SEQ ID NO: 2038 - protein, 213 aa, Eleusine coracana
MAVEVCVKAAVGHPDTLGDCPFSQRVLLTLQEKKVPYEMKLIDVSNKPDWFLKINPEGKVPVFNGGDGKWIADSDVIVQVIEEKYPTPPLVTPPEYASVGSKIFSTFVTFLKSKDSNDGSEQALLTELQALEEHLKAHGPYINGQNVSAVDLSLAPKLYHLTVALDHFKGWKIPENLTNVHAYVKALFSRESFEKTKAAKEHVIAGWAPKVNA

SEQ ID NO: 2039 - DNA, 639 bp, Euphorbia esula
atggctctggagatctgtgtcaaggccgccgccggtgctcctgatactctcggcgactgtcctttcgctcacagagttctattaactctagaagagaagaaaattccctacaaaatgcatctcatcaatctcgctgaaaagccccaatggtttttggatattagcccagaagggaaggtcccagtggtgaaatttgatgacaaatgggtgccagactctgatgtgattgttgggattttagaagagaaatatcccgagccatcactcgttactcctcctgaatttgcttctgtaggttcaaaagtattccctagcttcttcaaatttctgaagagcaaggatccaagtgacggaacagaacaggctttgcttgaggaactcaaggcattagatgagcatcttaaagcacatggtccattcattgctggggaaaagattactgctgctgatatgagcttggctccaaagttgtatcatcttgagattgctcttggccattttaaaaactggactatccctgaaagcttgacccatgtccataattacatgaagtcgatgttctctcgtgaatcattcgagaagaccaaggcagcaaaggaacatgtgattgcgggttgggcgcctaaagtgaatgcatga

SEQ ID NO: 2040 - protein, 212 aa, Euphorbia esula
MALEICVKAAAGAPDTLGDCPFAHRVLLTLEEKKIPYKMHLINLAEKPQWFLDISPEGKVPVVKFDDKWVPDSDVIVGILEEKYPEPSLVTPPEFASVGSKVFPSFFKFLKSKDPSDGTEQALLEELKALDEHLKAHGPFIAGEKITAADMSLAPKLYHLEIALGHFKNWTIPESLTHVHNYMKSMFSRESFEKTKAAKEHVIAGWAPKVNA

SEQ ID NO: 2041 - DNA, 642 bp, Festuca arundinacea
atgactgtggaggtgctggtcaaggccgccgccgggagcccggacacgctcggcgactgtcctttcgcacagagggtgctgctcacgctggaggagaagaaggagccctacgagaccaagctcgtcgacctgagcaacaagcccgactggtttctggagatcaacccagaggggaaggtgcctgtgtttaacagtggtgatggtaaatggattgctgattccgatgtaatcactcagatcattgaggagaagtacccaactccatcacttgtcacccctcctgagtatgcatcagtgggctcaaagatcttctcagccttcattgcgttcttgaagagcaaggatgccacggatggcacagagaaggcacttgttgacgagctgcaggcactcgatgagcacctaaaagctcatggcccctacatcaacggggagaatgtatcggctgcagatctgagccttggcccgaagctcttccatctccaggttgccctggatcatttcaaaggctggaagatccctgagaccctgaccagcgtctatgcctacaccgaggctctgttcagccgggagtctttcgggaagacaaaaccagccaaggagcacctgatcgccggatgggcgccgaaggtgaacccgtaa

SEQ ID NO: 2042 - protein, 213 aa, Festuca arundinacea
MTVEVLVKAAAGSPDTLGDCPFAQRVLLTLEEKKEPYETKLVDLSNKPDWFLEINPEGKVPVFNSGDGKWIADSDVITQIIEEKYPTPSLVTPPEYASVGSKIFSAFIAFLKSKDATDGTEKALVDELQALDEHLKAHGPYINGENVSAADLSLGPKLFHLQVALDHFKGWKIPETLTSVYAYTEALFSRESFGKTKPAKEHLIAGWAPKVNP

SEQ ID NO: 2043 - DNA, 642 bp, Fragaria vesca
atggctcttgaggttgctgccaaggctgctgcaggcgcccctgaacttcttggggattgtcctttcactcaaagggttcttctcactttggaggagaagaaagtaccttacaagctccatctcatcaacttggctgacaagcccaaatggtttacagaggtgaatccagagggaaaggtgcctgtggtgaagtttgatgacaaatgggtatctgattctgatgtgcttgtcgggattcttgaggagaaataccctgaaccttgtctccaaactcctcctgagtttgcttcagtgggatcaaagatttttgggtcatttgtgacattcctcaagagcaaggatcccagtgatgggtcggaacaggctttgcttaatgaactgaaggcattggatgaccatctcaaggcacatggtccgtacattgctggagagaaagtcactgctgctgatctaagcttggcaccaaaactgtaccatttaaaggtggctcttggccatttcaagaagtggactgtccctaaagctttgacccattaccataagtacactgagttgttgttctcaagggaatcttttgccaagaccatccccgaggacaaatatatcattgctggatgggagccgaaagtcaaccccaaataa

SEQ ID NO: 2044 - protein, 213 aa, Fragaria vesca
MALEVAAKAAAGAPELLGDCPFTQRVLLTLEEKKVPYKLHLINLADKPKWFTEVNPEGKVPVVKFDDKWVSDSDVLVGILEEKYPEPCLQTPPEFASVGSKIFGSFVTFLKSKDPSDGSEQALLNELKALDDHLKAHGPYIAGEKVTAADLSLAPKLYHLKVALGHFKKWTVPKALTHYHKYTELLFSRESFAKTIPEDKYIIAGWEPKVNPK

SEQ ID NO: 2045 - DNA, 639 bp, Gossypium arboreum
atggctttggagatctgtgtcaaggctgctgttggtgcccctaatgttcttggagactgtccattctcccagagagctcttcttactttggaggaaaagaagatttcctacaaaatgcaccttatcaatatcagtgacaaacctcaatggtttttggagataagtccagaagggaaagtaccagtggtgaagtttgatgacaaatgggtggctgattctgatgtaattgttggaatccttgaagaaaaataccctcagccttgtctcaaaacccctcctcaatttgcctctgttggatcaaacatatttggaacttttgtcacatttttgaagagcaaagatgctaatgatggatctgagcaggctttgcttaatgaactcaaggcattggatgaacatcttaaggcacatggcccattcattgctggggaaaagataagtgcagttgatttagctttgggaccaaaactttaccatcttgaggttgctctgggccatttcaagaaatggactgttccggaaagcttgactaatgtccgcaattacatgaagtcgatattcactcgtgaatcgttcgtgaaaacgcgggctgctaaggaatacgtgatcgccgggtgcgcacctaaggggaatgcatga

SEQ ID NO: 2046 - protein, 212 aa, Gossypium arboreum
MALEICVKAAVGAPNVLGDCPFSQRALLTLEEKKISYKMHLINISDKPQWFLEISPEGKVPVVKFDDKWVADSDVIVGILEEKYPQPCLKTPPQFASVGSNIFGTFVTFLKSKDANDGSEQALLNELKALDEHLKAHGPFIAGEKISAVDLALGPKLYHLEVALGHFKKWTVPESLTNVRNYMKSIFTRESFVKTRAAKEYVIAGCAPKGNA

SEQ ID NO: 2047 - DNA, 639 bp, Gossypium hirsutum
atggctttagagatctgtgtgaaagctgctgctggtgccccagatattcttggagattgtccattctgccaaagggttcttcttactttggaggaaaagaaggttccttacaagttgaaccttgttaatctcagtgacaaaccccaatggttcttggagataagtccagaaggaaaggtaccagtggtgaagtttgatgacaaatgggtggctgattctgatgtgattgttgggattattgaagacaagttccctgagccttctttgaaaacaccccctgaatttgcccatgttggatcgaaaatatttggtacttttatctcatttttgaagagcaaggatgcaaacaatggatcagagcaggatttggttaatgaactgaaagcattggatgaacatcttaagggaaatgggccgttcattgctggggaaaagattacggctgttgatttaggtttgggaccaaagctgtaccatctcgagatcacacttggccattttaagaagtggactgttcctgaaagcttgacttatgtccacaattacatgaagtcgattttcggtcgggaatctttcgtgaaaactaaggctgcgaaggaacatgtgatcgagggatgggcaccgaaggtcaatgcatga

SEQ ID NO: 2048 - protein, 212 aa, Gossypium hirsutum
MALEICVKAAAGAPDILGDCPFCQRVLLTLEEKKVPYKLNLVNLSDKPQWFLEISPEGKVPVVKFDDKWVADSDVIVGIIEDKFPEPSLKTPPEFAHVGSKIFGTFISFLKSKDANNGSEQDLVNELKALDEHLKGNGPFIAGEKITAVDLGLGPKLYHLEITLGHFKKWTVPESLTYVHNYMKSIFGRESFVKTKAAKEHVIEGWAPKVNA

SEQ ID NO: 2049 - DNA, 642 bp, Glycine max
atggctctcgaggttgctgttaaggctgctgttggtgctccaaatgttctcggagattgtccattttcccaaagggtcctcttaactttagaggagaagaaaatcccttacaaactccacctcatcgatctcagtagtaaacccgaatggtttttgggtgtgaatcccgaagggaaggtgccagtggttctttttgatggcaaatgggtggctgattctgatgtgattgtggggatactcgaggaaaagtacccagaaccctctctcgtcactcctcctgaatttgcctccgtgggatcaaagatatttgggtcttttgtgagttttttgaagagcaaggatacaaacgatggaactgagcaaacgttggttgctgaattgagtgccttggatgaacatctcaaggcccatggtccatacattgctggggagaaagtcactgctgttgatctgagtttggcacccaaactgtaccatcttgtggtagcactgagtcacttcaagaattggaatattccagaaagtttgacacatgtccacaactacactaagctgctcttctcccgggagtcatttgagaaaacaaagcctccaaaggtagaatatgttattagtggatgggcgcctaaggtgaatgcttga

SEQ ID NO: 2050 - protein, 213 aa, Glycine max
MALEVAVKAAVGAPNVLGDCPFSQRVLLTLEEKKIPYKLHLIDLSSKPEWFLGVNPEGKVPVVLFDGKWVADSDVIVGILEEKYPEPSLVTPPEFASVGSKIFGSFVSFLKSKDTNDGTEQTLVAELSALDEHLKAHGPYIAGEKVTAVDLSLAPKLYHLVVALSHFKNWNIPESLTHVHNYTKLLFSRESFEKTKPPKVEYVISGWAPKVNA

SEQ ID NO: 2051 - DNA, 642 bp, Glycine max
atggctctcgaggttgctgttaaggctgctgttggggctccaaatgttctcggagattgtccattttcccaaagggtcctcttaactttggaggagaagaaaattccttacaaactccacctcatcgatctcagtaacaaacccgaatggtttttgggtgtgaatcctgaagggaaggtgccagtggttctttttgatggcaaatgggtggctgattctgatgtaattgtggggatactagaggaaaagtacccagaaccctctctaatcactcctcctgaatttgcctccgtgggatcaaagatatttgggtcttttgtgagttttctgaagagcaaggatacaaacgatggaactgagcaagcattggttgctgaattgagtgccttggatgaacatctcaagacccatggtccatacattgctggggagaaagtcactgctgttgatctgagtttggcaccaaaactgtaccatcttgtggtagcactgggccacttcaagaattggaatattccagaaagtttggtacatgtgcacaattacactaagctgctgttctcccgagagtcatttgagaaaacaaagcctccaaaggaggaatatgttattgctggatgggcgcctaaggtgaatgcttga

SEQ ID NO: 2052 - protein, 213 aa, Glycine max
MALEVAVKAAVGAPNVLGDCPFSQRVLLTLEEKKIPYKLHLIDLSNKPEWFLGVNPEGKVPVVLFDGKWVADSDVIVGILEEKYPEPSLITPPEFASVGSKIFGSFVSFLKSKDTNDGTEQALVAELSALDEHLKTHGPYIAGEKVTAVDLSLAPKLYHLVVALGHFKNWNIPESLVHVHNYTKLLFSRESFEKTKPPKEEYVIAGWAPKVNA

SEQ ID NO: 2053 - DNA, 639 bp, Gossypium raimondii
atggctttagagatctgtgtgaaagctgctgctggtgcccctgatattcttggagattgtccattctgccaaagggttcttcttactttggaggaaaagaaggttccttacaagttgaaccttgttaatctcagtgacaaaccccaatggttcttggagataagtccagaaggaaaggtaccagtggtgaagtttgatgacaaatgggtggctgattctgatgtgattgttgggattattgaagacaagttccctgagccttctttgaaaacaccccctgaatttgcccatgttggatcgaaaatatttggtacttttatctcatttttgaagagcaaggatgcaaacaatggatcagagcaggatttggttaatgaactgaaagcattggatgaacatcttaagggacatgggccgttcattgctggggaaaagattacggctgttgatttaggtttgggaccaaagctgtaccatctcgagatcacacttggccattttaagaagtggactgttcctgaaagcttgacttatgtccacaattacatgaagtcgattttcggtcgggaatctttcgtgaaaactaaggctgcgaaggaacatgtgatcgagggatgggcaccgaaggtcaatgcatga

SEQ ID NO: 2054 - protein, 212 aa, Gossypium raimondii
MALEICVKAAAGAPDILGDCPFCQRVLLTLEEKKVPYKLNLVNLSDKPQWFLEISPEGKVPVVKFDDKWVADSDVIVGIIEDKFPEPSLKTPPEFAHVGSKIFGTFISFLKSKDANNGSEQDLVNELKALDEHLKGHGPFIAGEKITAVDLGLGPKLYHLEITLGHFKKWTVPESLTYVHNYMKSIFGRESFVKTKAAKEHVIEGWAPKVNA

SEQ ID NO: 2055 - DNA, 645 bp, Helianthus annuus
atggcgattgagatctgtgtcaaagctgctactggtgcccctgatgttctcggagactgtccattttgccaaagggtacttttgactctggaagagaagaaagtttcttacaaaacccatctcataaatcttgacagcaaaccagaatggtttcttgaagtgaacccagatgggaaagttcctttgataaagtttgatgagaaatgggtgtctgattctgatgttattgtgggtttgattgaagagaagtatcctgaaccttctcttgttactccccctgaacttgcctctgtggggtcaaagattttcccaaagtttgtgggattcttgaagagtaaggatgagaatgatgggactgaacaggctttgcttgatgaactgaatgcattggaagagcacctcaagaacaaggggccatacgttaacggagaaaaggtgacagccgttgatttgagtttggcgccaaagctgtaccatcttaaggtggctcttggtcatttcaagaagtggagtgttccagaaagtctgactcatgtgcataactacatgaagtcgctcttctctagggagtcgtttgagaaaacaaaacctgctaaagaagaatatgtgattgctggatgggcgccaaaggttaataatgcatga

SEQ ID NO: 2056 - protein, 214 aa, Helianthus annuus
MAIEICVKAATGAPDVLGDCPFCQRVLLTLEEKKVSYKTHLINLDSKPEWFLEVNPDGKVPLIKFDEKWVSDSDVIVGLIEEKYPEPSLVTPPELASVGSKIFPKFVGFLKSKDENDGTEQALLDELNALEEHLKNKGPYVNGEKVTAVDLSLAPKLYHLKVALGHFKKWSVPESLTHVHNYMKSLFSRESFEKTKPAKEEYVIAGWAPKVNNA

SEQ ID NO: 2057 - DNA, 645 bp, Helianthus ciliaris
atggcgattgagatctgtgtcaaagctgctactggtgcccctgatgttcttggagactgtccattttgccaaagggtacttttgactctggaagagaagaaagtttctttcaaaacccatctcataaatcttgatagcaaaccagaatggtttcttgaagtgaacccagatgggaaagttccttcgataaagtttgatgagaaatgggtgtctgattctgatgttattgtgggtttgattgaagaaaagtatcctgaaccttctcttattaccccccatgaacttgcctctgtggggtcaaagattttcccaaagtttgtgggattcttgaagagtaagggtgacaatgatgggactgaacaggctttgcttgatgaactgaatgcattggaagaacacctcaagaacaaggggccttatgttaacggagaaaaggtcacagccgttgatttgagtttggcgccaaagctgtaccatcttaaggtggctcttggtcatttcaagaagtggagtgttccagaaagtctgactcatgtgcataactacatgaagtcgctcttctctagggagtcgtttgagaaaacaaagcctgctaaagaagaatatgtgattgctggatgggcgccaaaggttaataatgcatga

SEQ ID NO: 2058 - protein, 214 aa, Helianthus ciliaris
MAIEICVKAATGAPDVLGDCPFCQRVLLTLEEKKVSFKTHLINLDSKPEWFLEVNPDGKVPSIKFDEKWVSDSDVIVGLIEEKYPEPSLITPHELASVGSKIFPKFVGFLKSKGDNDGTEQALLDELNALEEHLKNKGPYVNGEKVTAVDLSLAPKLYHLKVALGHFKKWSVPESLTHVHNYMKSLFSRESFEKTKPAKEEYVIAGWAPKVNNA

SEQ ID NO: 2059 - DNA, 645 bp, Helianthus exilis
atggcgattgagatctgtgtcaaagctgctactggtgcccctgatgttcttggagactgtccattttgccaaagggtacttttgactctggaagagaagaaagtttcttacaaaacccatctcataaatcttgacagcaaaccagaatggtttcttgaagtgaacccagatgggaaagttcctttgatcaagtttgatgagaaatgggtgtctgattctgatgttattgtgggtttgattgaagagaagtatcctgaaccttctcttattaccccctctgaacttgcctctgtggggtcaaagattttcccaaagtttgtgggattcttgaagagtaaggatgagaatgatgggactgaacaggctttgcttgatgaactgaatgcattggaagagcacctcaagaacaaggggccttacgttaacggagaaaaggtcacagccgttgatttgagtttggcgccaaagctgtaccatcttaaggtggctcttggtcatttcaagaagtggagtgttccagaaagtctgactcatgtgcataactacatgaagtcgctcttctctagggagtcgtttgagaaaacaaaacctgctaaagaagaatatgtgattgctggatgggcgccaaaggttaataatgcatga

SEQ ID NO: 2060 - protein, 214 aa, Helianthus exilis
MAIEICVKAATGAPDVLGDCPFCQRVLLTLEEKKVSYKTHLINLDSKPEWFLEVNPDGKVPLIKFDEKWVSDSDVIVGLIEEKYPEPSLITPSELASVGSKIFPKFVGFLKSKDENDGTEQALLDELNALEEHLKNKGPYVNGEKVTAVDLSLAPKLYHLKVALGHFKKWSVPESLTHVHNYMKSLFSRESFEKTKPAKEEYVIAGWAPKVNNA

SEQ ID NO: 2061 - DNA, 645 bp, Helianthus paradoxus
atggcgattgagatctgtgtcaaagctgctgctggtgcccctgatgttcttggggactgtccattttgccaaagggtacttttgactctggaagagaagaaagtttcttacaaaacccatctcataaatcttgacagcaaaccagaatggtttcttgaagtgaacccagatgggaaagttcctttgatcaagtttgatgagaaatgggtgtctgattctgatgttattgtgggtttgattgaagagaagtttcctgaaccttctcttattaccccccctgagcttgcctctgtggggtcaaagattttcccaaagtttgtgggattcttgaagagtaaggatgagaatgatgggactgaacaggctttgcttgatgaactgaatgcattggaagagcacctcaagaacaaggggtcttacgttaacggagaaaaggtcacagccgttgatttgggtttggcgccaaagctgtaccatcttaaggtggctcttggtcatttcaagaagtggagtgttccagaaagtctgactcatgtgcataactacatgaagtcgctcttctctagggagtcgtttgagaaaacaaaacctgctaaagaagaatatgtgattgctggatgggcgccaaaggttaataatgcatga

SEQ ID NO: 2062 - protein, 214 aa, Helianthus paradoxus
MAIEICVKAAAGAPDVLGDCPFCQRVLLTLEEKKVSYKTHLINLDSKPEWFLEVNPDGKVPLIKFDEKWVSDSDVIVGLIEEKFPEPSLITPPELASVGSKIFPKFVGFLKSKDENDGTEQALLDELNALEEHLKNKGSYVNGEKVTAVDLGLAPKLYHLKVALGHFKKWSVPESLTHVHNYMKSLFSRESFEKTKPAKEEYVIAGWAPKVNNA

SEQ ID NO: 2063 - DNA, 645 bp, Helianthus tuberosus
atggcgattgagatctgtgtcaaagctgctactggtgcccctgatgttcttggagactgtccattttgccaaagggtacttttgactctggaagagaagaaagtttcttacaaaacccatctcataaatcttgacagcaaaccagaatggtttcttgaagtgaacccagatgggaaagttccttcgataaagtttgatgagaaatgggtgtctgattctgatgttattgtgggtttgattgaagaaaagtatcctgaaccttctcttattaccccccctgaacttgcctctgtggggtcaaagattttcccaaagtttgtgggattcttgaagagtaaggatgagaatgatgggactgaacaggctttgcttgatgaactgaatgcattggaagaacacctcaagaacaaggggccatacgttaacggagaaaaggtcacagccgttgatttgagtttggcgccaaagctgtaccatcttaaggtggctcttggtcattttaagaagtggagtgttccagaaagtctgactcatgtgcataactacatgaagtcgctcttctctagggagtcgtttgagaaaacaaaacctgctaaagaagaatatgtgattgctggatgggcgccaaaggttaataatgcatga

SEQ ID NO: 2064 - protein, 214 aa, Helianthus tuberosus
MAIEICVKAATGAPDVLGDCPFCQRVLLTLEEKKVSYKTHLINLDSKPEWFLEVNPDGKVPSIKFDEKWVSDSDVIVGLIEEKYPEPSLITPPELASVGSKIFPKFVGFLKSKDENDGTEQALLDELNALEEHLKNKGPYVNGEKVTAVDLSLAPKLYHLKVALGHFKKWSVPESLTHVHNYMKSLFSRESFEKTKPAKEEYVIAGWAPKVNNA

SEQ ID NO: 2065 - DNA, 639 bp, Hordeum vulgare
atgaccgaggtctgcgtcaaggccgccgtcggccaccccgacacgctcggcgactgccccttctcgcagagggtgctgctcacgctggaggagaagaaggtgccctacgagatgaagctcatcgacgtcagcaacaagcccgactggttcctgaagatcaatccagagggcaaggtgcctgtgtttaacggtggtgatggcaaatggattgctgattctgatgtgattactcaagtcattgaggagaagtacccaactccatcacttgtgacccctcctgagtatgcatcagtgggatcaaagatcttctccacctttgtcaccttcttgaagagcaaggacgccagcgatggctcggagaaggcacttgttgacgagctgcaggcactggaagagcacctaaaggcccatggaccctatatcaacggggcgaatgtctccgccgcggatctcagcttggctccgaagctcttccacctccaggttgccctggagcacttcaaaggctggaaggtccctgaaacactgaccagcgtccatgcctacaccgaggctctcttcagccgcgagtcgttcgtcaagaccaagccgaccaaggagaacctgatcgccgggtgggcgccgaaggtgaacccgtaa

SEQ ID NO: 2066 - protein, 212 aa, Hordeum vulgare
MTEVCVKAAVGHPDTLGDCPFSQRVLLTLEEKKVPYEMKLIDVSNKPDWFLKINPEGKVPVFNGGDGKWIADSDVITQVIEEKYPTPSLVTPPEYASVGSKIFSTFVTFLKSKDASDGSEKALVDELQALEEHLKAHGPYINGANVSAADLSLAPKLFHLQVALEHFKGWKVPETLTSVHAYTEALFSRESFVKTKPTKENLIAGWAPKVNP

SEQ ID NO: 2067 - DNA, 642 bp, Ipomoea nil
atggccgtggagctctgtgtcaaggctgctactggcgcccctgatgatcttggagactgcccatttagccagcgggtaacactgaccctggaggaaaagaatgtcccttacaagattcatcttatcaacaccagcgacaagcctgaatggttcctgacggcaaatcctgaggggaaggttccggtgatcaaattcgatgacaaatggattgctgattctgatgtgattgttgggatcattgaagagaaatacccaaacccttctctctcagctccccctgaagttgcctctgttggctctgagatatttccctctttcgttaagtttctgacgagcaaggactccagtgatggtaccgagcaagctctggttgaggaactcaaggcattggatgaacatctcaaggctcatggaccatttgtcaatggggagaatatctgttctgttgatctgagtttggcaccgaagctgtatcaccttgtggtggtacttggtcattacaagaaatggagtgtcccggagaacttgactcacgtgcataattacttgaagttgctctttgctcgggagtctttccagaagacgaagcctccaaaagaagagtatgtcattgcagggtgggcttcaaaggttaatgcatga

SEQ ID NO: 2068 - protein, 213 aa, Ipomoea nil
MAVELCVKAATGAPDDLGDCPFSQRVTLTLEEKNVPYKIHLINTSDKPEWFLTANPEGKVPVIKFDDKWIADSDVIVGIIEEKYPNPSLSAPPEVASVGSEIFPSFVKFLTSKDSSDGTEQALVEELKALDEHLKAHGPFVNGENICSVDLSLAPKLYHLVVVLGHYKKWSVPENLTHVHNYLKLLFARESFQKTKPPKEEYVIAGWASKVNA

SEQ ID NO: 2069 - DNA, 639 bp, Lotus japonicus
atggctctcgagattgctgtcaaggctgctgttggtgctcctcatgctctcggagactgtccattttcccaaagggtcctcttaactctggaggagaagaaattcccacacaaaattcacctcatcgatctcagcaacaaaccacaatggtttttggatgtgaaccctgaagggaaggttcctgtggttaagtttggtgacaaatgggtggctgattctgatgttattgtgggaattcttgaggaaaaatatcctgaaccatctctggttactcctcctgaatttgcctcagtgggatcaaagatatttgggtcttttgtgagctttctgaagagcaaggatgcaaatgatggaactgagcaagcattggttgctgagttgagtgctttggatgaacatcttaaggcccatggtccatatgttgctggggagagggtcactgctgttgatttgagtttggcaccaaaactgtaccatctagtggtagcacttgaccacttcaagaaatggagcattcctgaaagtttggcacatgtccacaactatgtcaagttgctcttcgcccgggaatcatttgagaaaactaaggcagcaaaggaatatgtcattgcaggatgggctccaaaggtcaatgcatga

SEQ ID NO: 2070 - protein, 212 aa, Lotus japonicus
MALEIAVKAAVGAPHALGDCPFSQRVLLTLEEKKFPHKIHLIDLSNKPQWFLDVNPEGKVPVVKFGDKWVADSDVIVGILEEKYPEPSLVTPPEFASVGSKIFGSFVSFLKSKDANDGTEQALVAELSALDEHLKAHGPYVAGERVTAVDLSLAPKLYHLVVALDHFKKWSIPESLAHVHNYVKLLFARESFEKTKAAKEYVIAGWAPKVNA

SEQ ID NO: 2071 - DNA, 639 bp, Lactuca perennis
atggctattgagatctgttgcaaagctgctaccggtgcccctgatgttcttggagactgtccattttgccaaagggttctcttgactctggaagagaagaaactcacctacacaactcatcttattaatctggatagcaaacccgaatggtttcttgaagtcaacccagatgggaaagttccgttgataaagttcgatgacaaatggatttctgattctgatgttattgtgggtctaattgaagagaagttccctgaaccttcactttctcctccccctgaacttgcctctgtgggatcgaagatatttggaaagtttgtggcattcttaaagagcaaggatgccaatgatggaacagagcaagctttgcttgatgaactgaagtcattggatgaacacctcaagactcatgggccttatgtgaatggagaaaagatcacagccgttgatttgagtttggcacccaagctctaccaccttgaggtggctcttgctcatttcaagaagtggtctattcctgaaagtttgactaatgtgcataactacacaaaggctttgtttgctcgggagtcgtttgagaaaacgaaagctgctaaagaatatgtgattgctggatgggcaccaaaagttaatgcatga

SEQ ID NO: 2072 - protein, 212 aa, Lactuca perennis
MAIEICCKAATGAPDVLGDCPFCQRVLLTLEEKKLTYTTHLINLDSKPEWFLEVNPDGKVPLIKFDDKWISDSDVIVGLIEEKFPEPSLSPPPELASVGSKIFGKFVAFLKSKDANDGTEQALLDELKSLDEHLKTHGPYVNGEKITAVDLSLAPKLYHLEVALAHFKKWSIPESLTNVHNYTKALFARESFEKTKAAKEYVIAGWAPKVNA

SEQ ID NO: 2073 - DNA, 639 bp, Lactuca saligna
atggcgattgagatctgctgcaaagctgctaccggtgcccctgatgttcttggagactgtccattttgccaaagggttctcttgactctggaagagaagaaactcacctacacaactcatcttattaatctggagagcaaacccgcatggtttcttgaagtgaacccagatgggaaagttccgttgataaaattcgatgacaagtggatttctgattccgatgttattgtgggtctgattgaagagaagttccctgaaccttcactttctcctccccctgaactcgcatctgtgggatcgaagatattcccaaagtttgtgacattcttaaagagcaaggatgcaaatgatggaacagagcaagctttgcttgatgaattgaagtcattggatgaacacctcaagaatcatggaccttatgtgaatggagaaaagatcacagccgttgatttgagtttggcaccaaagctttaccaccttgaggtgactcttgctcatttcaagaagtggactgttcctgaaagtttgactcatgtgcataactacacaaagtctttgtttgctcgggagtcgtttgagaaaaccaaagctgctaaagaatatatgattgccggatgggcaccaaaggttaatgcatga

SEQ ID NO: 2074 - protein, 212 aa, Lactuca saligna
MAIEICCKAATGAPDVLGDCPFCQRVLLTLEEKKLTYTTHLINLESKPAWFLEVNPDGKVPLIKFDDKWISDSDVIVGLIEEKFPEPSLSPPPELASVGSKIFPKFVTFLKSKDANDGTEQALLDELKSLDEHLKNHGPYVNGEKITAVDLSLAPKLYHLEVTLAHFKKWTVPESLTHVHNYTKSLFARESFEKTKAAKEYMIAGWAPKVNA

SEQ ID NO: 2075 - DNA, 639 bp, Lactuca serriola
atggcgattgagatctgttgcaaagctgctaccggtgcccctgatgttcttggagactgtccattttgccaaagggttctcttgactctggaagagaagaaactcacctacacaactcatcttattaatctggagagcaaacccgaatggtttcttgaagtgaacccagatgggaaagttccgttgataaagttcgatgacaaatggatttctgattctgatgttattgtgggtctgattgaagagaagttccctgaaccttcactttctcctccacctgaactcgcctctgtgggatcgaagatattcccaaagtttgtgacattcttaaagagcaaggatgccaatgatggaacagagcaagctttgcttgatgaattgaagtcattggaagaacacctcaagaataatggaccttatgtgaatggagaaaagatcacagccgttgatttgagtttggcaccaaagctttaccaccttgaggtgactcttgctcatttcaagaagtggactgttcctgaaagtttgactcatgtgcataactacacaaagtctttgtttgctcgggagtcgtttgagaaaaccaaagctgctaaagattatgtgattgctggatgggcaccaaaggttaatccatga

SEQ ID NO: 2076 - protein, 212 aa, Lactuca serriola
MAIEICCKAATGAPDVLGDCPFCQRVLLTLEEKKLTYTTHLINLESKPEWFLEVNPDGKVPLIKFDDKWISDSDVIVGLIEEKFPEPSLSPPPELASVGSKIFPKFVTFLKSKDANDGTEQALLDELKSLEEHLKNNGPYVNGEKITAVDLSLAPKLYHLEVTLAHFKKWTVPESLTHVHNYTKSLFARESFEKTKAAKDYVIAGWAPKVNP

SEQ ID NO: 2077 - DNA, 639 bp, Linum usitatissimum
atggccgtggagatcgcagtgaaggcagccgctggtgcaccagatcttcaaggggactgtccgttttgccagagagttcagttgacattagaagagaagaaggttgcttacaagctgcatctagtcaatctcagtgataaaccccagtggtttctggacataagccctgaagggaaggttccagtggtgaaatttgatgacaaatgggttgctgattccgatgtcattgttgggatattagaggagaaatatcctgaaccgtctcttgtcactcctgatgaattttcctctgtgggttcgaagatcttcatatcgtttatcaacttcctgaagagcaaggacttgagtgatggcacagagcaggctttggttgagcagctgaaggcacttgatgagcatctcaaggcacatggcccctttattgcaggggacaagataaccggtgtggatttgagcttggctccgaaactgtatcatctggagacagctcttggccatttcaagaagtggagtattcctcaagacttgactcatgtgcacagttacttgaagacattgttcacccgcgagtcctttgagaagaccaagcctgagaaggaatatgtgattgctggttgggcaccaaaggtcaatgcatga

SEQ ID NO: 2078 - protein, 212 aa, Linum usitatissimum
MAVEIAVKAAAGAPDLQGDCPFCQRVQLTLEEKKVAYKLHLVNLSDKPQWFLDISPEGKVPVVKFDDKWVADSDVIVGILEEKYPEPSLVTPDEFSSVGSKIFISFINFLKSKDLSDGTEQALVEQLKALDEHLKAHGPFIAGDKITGVDLSLAPKLYHLETALGHFKKWSIPQDLTHVHSYLKTLFTRESFEKTKPEKEYVIAGWAPKVNA

SEQ ID NO: 2079 - DNA, 639 bp, Lactuca virosa
atggcgattgagatctgttgcaaagccgctgtcggtgctcctgatattcttggagactgtccattttgtcaaaaggttcttttgacactggaagagaagaaggtcacctacacaacccgtcttattaatctggacagcaaacccgaatggtttcttgaagtgaatccaaatgggaaagttccgttgataaaattcgatgacaaatggatttctgattctgatgctattgtgagtctgattgaagagaagttccctgaaccttcactttcttctccacctgaactcgcctctgtgggatcggagattttctcaaattttgtgacatttttaaagagcgaggatggtaatgatggaacagagcaagctttgcttgatgaattggaggcattggaagaacacctcaagaatcatgggccttatgtgaatggagaaaagatcacagccgttgatttgagtttggcaccaaagctttaccaccttgaggtggctcttcctcatttcaagaagtggactattcctgaaagtttgattcatgtgcgtaactacacaaagtctttgtttgctttggagtcgttcgagaaaaccaaagctgctgaagaatatgtgattgctggatgggtaccaaagcttaatgcatga

SEQ ID NO: 2080 - protein, 212 aa, Lactuca virosa
MAIEICCKAAVGAPDILGDCPFCQKVLLTLEEKKVTYTTRLINLDSKPEWFLEVNPNGKVPLIKFDDKWISDSDAIVSLIEEKFPEPSLSSPPELASVGSEIFSNFVTFLKSEDGNDGTEQALLDELEALEEHLKNHGPYVNGEKITAVDLSLAPKLYHLEVALPHFKKWTIPESLIHVRNYTKSLFALESFEKTKAAEEYVIAGWVPKLNA

SEQ ID NO: 2081 - DNA, 639 bp, Mesembryanthemum crystallinum
atggctattgaggtttgtgtcaaagccgctgttggtgctcctgataccctcggtgactgcccatttagccaaagggtgctcttgactttggaggagaagaaactggtttaccaaattcaccttattgatgtcagtaacaagcccaaatggtttttggatgtgaatccagaagggaaggtgccagtgatcaagctggatgacaaatgggtttctgactctgatgtcattgttggccttcttgaggagaaatacccagagccttctcttgctcctaaccctgaattctcctctgtgggctccaagatcttttcagcttttgtttctttcttgaagagcaaggatgccaatgatgggactgagaaggctctagttgatgagctgacagcgctaaatgagcaccttaaatcaaatggtccttatgtgtgcggagacaaagttactgctgttgatttgagcttagcaccaaagctcttccatcttgaagtagctcttggccattttaagagctggtctgttccagaaaacttaactcacgtccataactacatgaagtcgctcttttctcgggagtcgttccagaaaaccaaggcggcgaaggaacatatggttcttggatgggcacctaaggtgaatgcatga

SEQ ID NO: 2082 - protein, 212 aa, Mesembryanthemum crystallinum
MAIEVCVKAAVGAPDTLGDCPFSQRVLLTLEEKKLVYQIHLIDVSNKPKWFLDVNPEGKVPVIKLDDKWVSDSDVIVGLLEEKYPEPSLAPNPEFSSVGSKIFSAFVSFLKSKDANDGTEKALVDELTALNEHLKSNGPYVCGDKVTAVDLSLAPKLFHLEVALGHFKSWSVPENLTHVHNYMKSLFSRESFQKTKAAKEHMVLGWAPKVNA

SEQ ID NO: 2083 - DNA, 642 bp, Malus domestica
atggctctcgaggtcgctgccaaggccgctgccggcgcacctgatctcctcggcgactgccctttctgccaaagggttactctaaccttggaggagaagaaagtaccctacaagctgcacctcatcaatctcagcgacaaacccaaatggtttacggaagtgaatccagaggggaaggtgcctgtggtgaagtttgatgacaaatgggtgcctgattccgatgtgattgttgggatcattgaggaaaaataccctgagccttctctcaaaacccctcctgaatttgcttctgtgggatcaaagatattgggatcatttgtgacatttctgaagagcaaggatcccggtgacggatcagaacaggctttgcttaccgaactgaaggcattagatgagcatcttaaggcacatggtccatacattgctggggagaaggtcactgctgcggatctaagcttggcaccaaaactgtaccatctcaaggtggctctcggccatttcaagaagtggacggttccagcagatttggcccattaccataagtacaccgagctgcttttctcaagggaatccttcgtgaagaccgctcctgctgacgagaaatatgtgattgcgggatgggagccgaaggtgaatccatga

SEQ ID NO: 2084 - protein, 213 aa, Malus domestica
MALEVAAKAAAGAPDLLGDCPFCQRVTLTLEEKKVPYKLHLINLSDKPKWFTEVNPEGKVPVVKFDDKWVPDSDVIVGIIEEKYPEPSLKTPPEFASVGSKILGSFVTFLKSKDPGDGSEQALLTELKALDEHLKAHGPYIAGEKVTAADLSLAPKLYHLKVALGHFKKWTVPADLAHYHKYTELLFSRESFVKTAPADEKYVIAGWEPKVNP

SEQ ID NO: 2085 - DNA, 639 bp, Manihot esculenta
atggctttggagatctgtgtcaaggcagctgtcggtgctcctgatgttataggagactgcccattttcccaaagggctctcttgactttggaagagaagaaactttcctacaagttgcacctgatcaatctcagtgataagcctcaatggtttttggaaataagccctgaagggaaggtgccagtggtgaaatttgatgacaaatgggttccagactctgatgtgattgttgggactttagaggagaagtaccctgagccatctcttgtcaccccgcctgaatatgcttctgtaggttcaaagatattcccatcttttgtcaaattcttgaagagcaaggatgccaatgatggatctgaacaggctttgctcggggaattggaggcattggaagagcatcttaaggcacatggtccatttattgctggggaaaagatcactgctgtagacttgagcttggcaccaaagttgtaccatcttgagattgctcttggccattttaagaagtggaaggtccctgaaaacttgcctcacgtccacaagtacatggagttgctcttctccagggaatcatttcagaagacaaaggctgcaaaggaacatgtgattttagggtgggagcctaaggtcaatgcatga

SEQ ID NO: 2086 - protein, 212 aa, Manihot esculenta
MALEICVKAAVGAPDVIGDCPFSQRALLTLEEKKLSYKLHLINLSDKPQWFLEISPEGKVPVVKFDDKWVPDSDVIVGTLEEKYPEPSLVTPPEYASVGSKIFPSFVKFLKSKDANDGSEQALLGELEALEEHLKAHGPFIAGEKITAVDLSLAPKLYHLEIALGHFKKWKVPENLPHVHKYMELLFSRESFQKTKAAKEHVILGWEPKVNA

SEQ ID NO: 2087 - DNA, 639 bp, Medicago truncatula
acacacttcccaattcccatcaacaaaacacacataagcaaactacttatttattatagaggagatcaacacactgcaaatttcaatccttcaaaagataagttacaacatcctattcttatttcttaataataatgctcgatcacagtgcatgtccggtgttcactaaactcgtaacttcgagctacttcatgcattgacctttggtgcccatccagcaatgatatactcctctgcagccttggttttctcaaatgattcacgagagaagagcaacttgatgtagttgtggacctttgccaaactctcaggaatagtccaactcttgaagtggcgaagtgttaccactagatggtacaattttggtgccaaactcaaatcaacagctgtgaccttctccccagcaacaaatggaccattggccttaagatgttcatccaaagcattgagttctgctaataaagcttgttctgttccatcatttgaatctttgctcttcagaaagctcgagaaagaagcaaatatgtttgaccccactgaggaaaattgagcaggagaaacaagagagggttcagggtatttgtcttcaagaattccaacaataacatctgaatcaggaacccatttaccatcaaactt

SEQ ID NO: 2088 - protein, 212 aa, Medicago truncatula
MALEVAVKAAVGAPTILGDCPFSQRVLLTLEERKIPHNIHLINLTDKPQWFLEVNPEGKVPVVKFDGKWVPDSDVIVGILEDKYPEPSLVSPAQFSSVGSNIFASFSSFLKSKDSNDGTEQALLAELNALDEHLKANGPFVAGEKVTAVDLSLAPKLYHLVVTLRHFKSWTIPESLAKVHNYIKLLFSRESFEKTKAAEEYIIAGWAPKVNA

SEQ ID NO: 2089 - DNA, 639 bp, Nicotiana tabacum
atggctgttgaaatctgtgtcaaggctgctgtgggtgcccctaatgtcctcggagactgtccatttagccaaagggcgcttctgacattggaggaaaagaaagtgccttacaagatgcacttgatcaatgttagtgacaagcccaaatggttcttggaagtgaacccagaaggaaaagttccagtgatcaagtttgatgaaaaatggatccctgattctgatgttattgttgggcttcttgaagagaaatacccaaatccctctctctctactccccctgaatttgcttctgtgggctcgaaaatatttccttcctttgtctcatttctgaagagcagggatgctagtgacggtactgagcaggctctgctcgacgagttaaaggctttggaagagcatctcaaggctcacggaccatatgtcaatggggcgaatatttgttcagtcgatttgagtttggctccgaaactgtaccatcttgaggtggctcttggccatttcaagaagtggagtgtacctgacagcttgagtcatgtgcgtaaatacatgaagttgctcttcgagcgagagtctttccagacaaccaaggctgcaaaagagtatgtcattgcaggatgggctccaaaggtcaatccatga

SEQ ID NO: 2090 - protein, 212 aa, Nicotiana tabacum
MAVEICVKAAVGAPNVLGDCPFSQRALLTLEEKKVPYKMHLINVSDKPKWFLEVNPEGKVPVIKFDEKWIPDSDVIVGLLEEKYPNPSLSTPPEFASVGSKIFPSFVSFLKSRDASDGTEQALLDELKALEEHLKAHGPYVNGANICSVDLSLAPKLYHLEVALGHFKKWSVPDSLSHVRKYMKLLFERESFQTTKAAKEYVIAGWAPKVNP

SEQ ID NO: 2091 - DNA, 642 bp, Oryza minuta
atgggcgtggaggtgtgcgtcaaggccgccgtcggccacccggacacgctcggcgactgtcccttctcgcagagggtgctgctgacgctggaggagaagaaggtgacctacgagatgaagctcatcgacatccagaacaagcccgactggtttctgaagatcagcccagaggggaaggtgcctgtgtttaacggtggtgatggcaaatggattcctgattctgatgtgatcactcaggtcattgaggagaagtacccaactccgtctcttgtcacccctcccgagtatgcatcagtgggatcaaagattttctcatgcttctcaacgttcttgaagagcaaggatccgaatgatggttcagagaaggctcttcttactgaactgcaggcacttgaggagcatctgaaagcgcatggcccctttatcaacgggcagaacatttcagctgctgaccttagcctggcaccaaagctctaccatctccaggttgctctggagcatttcaaaggctggaagatcccagaaaacctaaccaatgttcatgcgtacacagaggctctgtttagccgcgaatctttcatcaagacgaaggcagctaaggagcacctgattgctggatgggcaccaaaagtgaatgcgtaa

SEQ ID NO: 2092 - protein, 213 aa, Oryza minuta
MGVEVCVKAAVGHPDTLGDCPFSQRVLLTLEEKKVTYEMKLIDIQNKPDWFLKISPEGKVPVFNGGDGKWIPDSDVITQVIEEKYPTPSLVTPPEYASVGSKIFSCFSTFLKSKDPNDGSEKALLTELQALEEHLKAHGPFINGQNISAADLSLAPKLYHLQVALEHFKGWKIPENLTNVHAYTEALFSRESFIKTKAAKEHLIAGWAPKVNA

SEQ ID NO: 2093 - DNA, 642 bp, Oryza rufipogon
atgggcgtggaggtgtgcgtcaaggccgccgtcggccacccggacacgctcggcgactgtccattctcgcagagggtgctgctgactctggaggagaagaaggtgccctacgagatgaagctcatcgacgtccagaacaagcccgactggtttctgaagatcagcccagaggggaaggtgcctgtgtttaacggtggtgatggcaaatggattcctgattctgatgtgatcactcaagtcattgaggagaagtacccaaccccgtctcttgtcacccctcctgagtatgcatcagtgggatcaaaaattttctcatgcttcacaacgttcttgaagagcaaggatccaaatgatggttcagagaaggcacttcttactgaactgcaggcactcgaggagcatctgaaagctcatggcccctttatcaacgggcagaacatttcagctgctgaccttagcctggcaccaaagctctaccatctccaggttgctctggagcatttcaaaggctggaagatcccggaagacctaaccaatgttcatgcttacacagaggctctgtttagccgcgaatctttcatcaagacgaaggcagctaaggagcacctgattgctggatgggcaccaaaagtgaatgcgtaa

SEQ ID NO: 2094 - protein, 213 aa, Oryza rufipogon
MGVEVCVKAAVGHPDTLGDCPFSQRVLLTLEEKKVPYEMKLIDVQNKPDWFLKISPEGKVPVFNGGDGKWIPDSDVITQVIEEKYPTPSLVTPPEYASVGSKIFSCFTTFLKSKDPNDGSEKALLTELQALEEHLKAHGPFINGQNISAADLSLAPKLYHLQVALEHFKGWKIPEDLTNVHAYTEALFSRESFIKTKAAKEHLIAGWAPKVNA

SEQ ID NO: 2095 - DNA, 642 bp, Oryza sativa
atgggcgtggaggtgtgcgtcaaggccgccgtcggccacccggacacgctcggcgactgtccattctcgcagagggtgctgctgactctggaggagaagaaggtgccctacgagatgaagctcatcgacgtccagaacaaccccgactggtttctgaagatcagcccagaggggaaggtgcctgtgtttaacggtggtgatggcaaatggattcctgattctgatgtgatcactcaagtcattgaggagaagtacccaaccccgtctcttgtcacccctcctgagtatgcatcagtgggatcaaaaattttctcatgcttcacaacgttcttgaagagcaaggatccaaatgatggttcagagaaggcacttcttactgaactgcaggcactcgaggagcatctgaaagctcatggcccctttatcaacgggcagaacatttcagctgctgaccttagcctggcaccaaagctctaccatctccaggttgctctggagcatttcaaaggctggaagatcccggaagacctaaccaatgttcatgcttacacagaggctctgtttagccgcgaatctttcatcaagacgaaggcagctaaggagcacctgattgctggatgggcaccaaaagtgaatgcgtaa

SEQ ID NO: 2096 - protein, 213 aa, Oryza sativa
MGVEVCVKAAVGHPDTLGDCPFSQRVLLTLEEKKVPYEMKLIDVQNNPDWFLKISPEGKVPVFNGGDGKWIPDSDVITQVIEEKYPTPSLVTPPEYASVGSKIFSCFTTFLKSKDPNDGSEKALLTELQALEEHLKAHGPFINGQNISAADLSLAPKLYHLQVALEHFKGWKIPEDLTNVHAYTEALFSRESFIKTKAAKEHLIAGWAPKVNA

SEQ ID NO: 2097 - DNA, 639 bp, Populus euphratica
atggttctagagatcgctgtcaaagccgctgtcggtgctcctgatattcttggagactgcccatttagccagagagctctcttgactctggaagagaagaaaattccttacaagtctcatctcatcaatcttagtgacaaacctcaatggttcttggaggtaaaccccgaaggaaaggttccagtggtgaaatttgatgacaaatgggtctcagactctgatgtgattgttgggatcttagaggagaaataccctgtgccccctcttgtcactcccccggaatttgcctctgtgggctcaaagatattcccatctttcgtccagttcttgaagagcaaggatcccaacgatggtactgagcaggctttgcttgaggaattgaaggcgttggatgatcatcttaaagcacacggtccattcattgccggagaaaagatcactgctgtagatttgagcttggctccaaagctttaccatcttgaggttgctcttggccatttcaagaactggactatccctgacaacttgacacatgtcctcaactacataaagttgctgttctcccgtgaatcttttgagaagacgaaggctgctaaggaacatatcattgctggatgggagccaaaggtcaatgcatga

SEQ ID NO: 2098 - protein, 212 aa, Populus euphratica
MVLEIAVKAAVGAPDILGDCPFSQRALLTLEEKKIPYKSHLINLSDKPQWFLEVNPEGKVPVVKFDDKWVSDSDVIVGILEEKYPVPPLVTPPEFASVGSKIFPSFVQFLKSKDPNDGTEQALLEELKALDDHLKAHGPFIAGEKITAVDLSLAPKLYHLEVALGHFKNWTIPDNLTHVLNYIKLLFSRESFEKTKAAKEHIIAGWEPKVNA

SEQ ID NO: 2099 - DNA, 639 bp, Petunia hybrida
atgggtgttgaagtttgtgttaaggctgctgttggtgcccctaatgtccttggagactgtccatttagccaaagggtacttctgacattggaggaaaaaaaagtcccttacaagacgcacttgattgatgttagtgacaagcccaaatggttcttggaggtgtatccagaagggaaagttccagtgattaagtttgatgacaaatggatccctgattctgatgtcattgttggccttattgaagagaaatatccaagccccccactttctactcccactgaatttgcctctgtcggctcgaaaatattttcttcctttgtctcatttctgaagagcaaggattctactgatggtactgagcaggctctgcttgatgaattaaaagctttggaggagcatctcaaggctcatggaccatacgtcaatgggcaaaatatctgttcagttgatttgagcttggctcctaaactgtaccatctggaggtggctcttggccacttcaagaagtggagtgtccctgaaagcttgagtcatgtgcgcaattacatgaagttgctcttcgagcgtgagtctttccagaaaaccaaggctgcaaaagagtatgtcatcgcagggtgggctcccaaggtcaatccatga

SEQ ID NO: 2100 - protein, 212 aa, Petunia hybrida
MGVEVCVKAAVGAPNVLGDCPFSQRVLLTLEEKKVPYKTHLIDVSDKPKWFLEVYPEGKVPVIKFDDKWIPDSDVIVGLIEEKYPSPPLSTPTEFASVGSKIFSSFVSFLKSKDSTDGTEQALLDELKALEEHLKAHGPYVNGQNICSVDLSLAPKLYHLEVALGHFKKWSVPESLSHVRNYMKLLFERESFQKTKAAKEYVIAGWAPKVNP

SEQ ID NO: 2101 - DNA, 639 bp, Prunus persica
atggctcttgagattgctgtcaaggctgccgttggtgcccctgatgttcttggcgactgccctttctgccaaagggttcttctaacgttggaggagaagaaagtaccttacaagtttcacctcatcagtttcagcgacaaacccaaatggtttaccgaagtgaatccagagggaaaggtgcctgtggtgaagttcgatgacaaatgggtggctgattctgatgtgattgttgggattattgaggaaaaataccctgaaccttctctcaaaactcctcctgaatttgcttctgtgggatcaaagatatttggttcattcgtgacatttgtgaagagtaaggatcccagtgatgggtcagaacaggctttggttaatgagctgaaggcattggatgagcatcttaaggcgcatggtccatatattgctggggagaagatcactgccgcagatctaagcttggcaccaaaactgttccatctcaaggtggcccttggccatttcaagaagtggactgttcctgaagacttgaccagttactataagtacactgagctgcttttctcaaaggaatcttttgtgaagaccaaaactgaagagaaatatgtgattgccggctgggagtcgaaggtcaatccatga

SEQ ID NO: 2102 - protein, 212 aa, Prunus persica
MALEIAVKAAVGAPDVLGDCPFCQRVLLTLEEKKVPYKFHLISFSDKPKWFTEVNPEGKVPVVKFDDKWVADSDVIVGIIEEKYPEPSLKTPPEFASVGSKIFGSFVTFVKSKDPSDGSEQALVNELKALDEHLKAHGPYIAGEKITAADLSLAPKLFHLKVALGHFKKWTVPEDLTSYYKYTELLFSKESFVKTKTEEKYVIAGWESKVNP

SEQ ID NO: 2103 - DNA, 639 bp, Populus tremula
atggttctggagatcgctgtcaaagctgctgtcggtgcccctgatattcttggagactgcccatttagccagagagctctcttgactctggaagagaagaaaattccttacaagtctcatctcatcaatcttagtgacaaaccccaatggttcttggaggtaaacccggaaggaaaggttccagtggtgaaatttgatgacaaatgggtcgcagactctgatgtgattgttgggatcttagaggagaaataccctgagccctctcttgccactcctccggaatttgcctctgtgggctcaaagatattcccatctttcgtcaagttcttgaagagcaaggatcccaatgatggttctgagcaggctttgcttgaggaactgaaggctttggatgatcatcttatagcacacggtcccttcattgctggagaaaagatctctgctgttgatttgagcttggctccgaagctttaccatcttgaggttgctcttgcccatttcaagaactggactatccctgacaagttgacacatgtcctcaactacataaagttgctgttctcccgtgaatctttcgagaagacgaaggctgctaaggaatacatcattgctggatgggagccaaaggtcaatgcatga

SEQ ID NO: 2104 - protein, 212 aa, Populus tremula
MVLEIAVKAAVGAPDILGDCPFSQRALLTLEEKKIPYKSHLINLSDKPQWFLEVNPEGKVPVVKFDDKWVADSDVIVGILEEKYPEPSLATPPEFASVGSKIFPSFVKFLKSKDPNDGSEQALLEELKALDDHLIAHGPFIAGEKISAVDLSLAPKLYHLEVALAHFKNWTIPDKLTHVLNYIKLLFSRESFEKTKAAKEYIIAGWEPKVNA

SEQ ID NO: 2105 - DNA, 693 bp, Populus trichocarpa
atggtctctacccccgtcaacctttcactgctatttctcccacggacagaaataatggctttagagatctgtgtcaaagctgctgttggtgcccctaatattctcggagattgcccattttgccagagagttctgttgagtctggaagagaagaaaattccatacaagtcttatctcatcaatctgggtgataaacctcagtggtttttggagataagcccggaaggaaaggtcccagtggtgaaaattgatgacaaatgggtcgcagattctgacgtgattgttggtatcttagaggagaaaaaccctgaaccccctcttgccactcctccggaatttgcctctgtgggttcgaagatattcccatcttttgttaagttcttgaagagcaaggatcccaatgatggaactgagcaggctttgcttgaggaattgaaggcattggatgggcatctcaaggtgcacggtcctttcattgctggggaaaagatcacagcagtggatttgagcttggctccgaagctttaccatcttgaggttgctcttggccatttcaagaactggactatccctgacaatttgacacatgtcctcaactacattaagttgttgttctcccgtgaatctttcaagaagacaagagctgccgaggaacatgtcattgctggatgggagccaaaggtcaacgcatga

SEQ ID NO: 2106 - protein, 230 aa, Populus trichocarpa
MVSTPVNLSLLFLPRTEIMALEICVKAAVGAPNILGDCPFCQRVLLSLEEKKIPYKSYLINLGDKPQWFLEISPEGKVPVVKIDDKWVADSDVIVGILEEKNPEPPLATPPEFASVGSKIFPSFVKFLKSKDPNDGTEQALLEELKALDGHLKVHGPFIAGEKITAVDLSLAPKLYHLEVALGHFKNWTIPDNLTHVLNYIKLLFSRESFKKTRAAEEHVIAGWEPKVNA

SEQ ID NO: 2107 - DNA, 639 bp, Populus trichocarpa
atggttctggagatcgctgtcaaagctgctgtcggtgcccctgatattcttggagactgcccatttagccagagagctctcttgactctggaagagaagaaaattccttacaagtctcatctcatcaatcttagtgacaaacctcaatggttcttggaggtaaacccggaaggaaaggttccagtggtgaaatttgatgacaaatgggtctcagactctgatgtgattgttgggatcttagaggagaaataccctgagccctctcttgccactcctccggaatttgcctctgtgggctcaaagatattcccatctttcgtcaagttcttgaagagcaaggatcccaacgatggtactgagcaggctttgcttgaggaattgaaggcgttggatgatcatcttaaagcacacggtccattcattgctggagaaaagatcactgctgtagatttgagcttggctccgaagctttaccatcttgaggttgctcttgcccatttcaagaactggactatccctgacaagttgacacatgtcctcaactacataaagttgctgttctcccatgaatctttcgagaagacgaaggctgctaaggaacatatcattgctggatgggagccaaaggtcaatgcatga

SEQ ID NO: 2108 - protein, 212 aa, Populus trichocarpa
MVLEIAVKAAVGAPDILGDCPFSQRALLTLEEKKIPYKSHLINLSDKPQWFLEVNPEGKVPVVKFDDKWVSDSDVIVGILEEKYPEPSLATPPEFASVGSKIFPSFVKFLKSKDPNDGTEQALLEELKALDDHLKAHGPFIAGEKITAVDLSLAPKLYHLEVALAHFKNWTIPDKLTHVLNYIKLLFSHESFEKTKAAKEHIIAGWEPKVNA

SEQ ID NO: 2109 - DNA, 642 bp, Poncirus trifoliata
atggccgtggagatttgtgtgaaagccgctgttggcgctcctgatattctcggggactgcccattttcccaaagggctttgcttactttggaggaaaagaaagttacatacaagcgtcacctcatcaatatcagtgacaagcctcaatggtttttggagataagcccagaagggaaagtacctgtggtaaagtttgatgacaagtgggtggctgactctgatgtgattgttagaattgttgaggagaagtatcctgagcctcctcttaccactcctcctgaatttgcctctgttggatcaaagatattcctatcttttgtcaatttcttgaagagcaaggacccaaatgatgggacagagcaagctttgctggaggaattgaaagcattggatgagcatcttaagactcatggaggtccattcattgctggagagaaggtcactgctgtagatttgagcttggcaccaaagctgtaccaccttcaggtggctcttgaacatttcaagcagtggactgtccctgagagcttggctcatgtccatgggtacatgaagaagctttttgccctggaatcctttcagaagactaaggctgaaaagcaatacgtgattgcaggatgggcgccgaaggtcaatgcatga

SEQ ID NO: 2110 - protein, 213 aa, Poncirus trifoliata
MAVEICVKAAVGAPDILGDCPFSQRALLTLEEKKVTYKRHLINISDKPQWFLEISPEGKVPVVKFDDKWVADSDVIVRIVEEKYPEPPLTTPPEFASVGSKIFLSFVNFLKSKDPNDGTEQALLEELKALDEHLKTHGGPFIAGEKVTAVDLSLAPKLYHLQVALEHFKQWTVPESLAHVHGYMKKLFALESFQKTKAEKQYVIAGWAPKVNA

SEQ ID NO: 2111 - DNA, 642 bp, Panicum virgatum
atgaccgtggaggtgtgcgtgaaggccgccgccggggcccccgacaccctcggcgactgccccttctcccagagggtgctgctcacgctggaggagaagaaggtcccctacgagatgaagctcgtcgacctcagcaacaagcccgaatggtttctgaagatcagtccggagggtaaggtgcctgtgtttaacagtggtgatgacaaatggattgctgactctgatgtgataactcaagtcattgaggagaaattcccaactccatctctggtcacccctccagaatatgcatcagtgggatcaaagattttcccatcctttgtcaagttcctgaagagcaaagatgctagtgatggttcagagaaggcacttcttgatgagctacaggcactagatgagcatctgaaagctcatggtccctacatcaacggggagaatgtatcagctgctgatcttaacctggggccgaagctcttccacctccaagtcgcactggagcatttcaaaggctggaagatcccagaaaacctgaccagcgtccatgcatacaccaaggcacttttcagccgcgaatcttttgtgaagactaagccagccaaggagcacctgattgcgggatgggcacccaaggtgaatgcgtaa

SEQ ID NO: 2112 - protein, 213 aa, Panicum virgatum
MTVEVCVKAAAGAPDTLGDCPFSQRVLLTLEEKKVPYEMKLVDLSNKPEWFLKISPEGKVPVFNSGDDKWIADSDVITQVIEEKFPTPSLVTPPEYASVGSKIFPSFVKFLKSKDASDGSEKALLDELQALDEHLKAHGPYINGENVSAADLNLGPKLFHLQVALEHFKGWKIPENLTSVHAYTKALFSRESFVKTKPAKEHLIAGWAPKVNA

SEQ ID NO: 2113 - DNA, 639 bp, Ricinus communis
atggctttggagatctgtgtgaaggcagctgttggtgctcctgatactattggagattgtccattttcccaaagagctcttttgactttagaagagaagaaaattccctacaagtgcaacttgatcaatctcagtgataaacctcaatggtttttgcagataagctctgaagggaaggtaccagtattaaaagttgatgataaatgggtgccagactctgatgtgattgttgggcttctagaggaaaaataccctgtgccatctcttgtcactcctcctgaatttgcttctgtaggttcaaagatattccctgcttttgtcaaattcttgaagagcaaggatgccaatgacggatcagaacaggccttgcttgaggaattgaaggcattggatgagcatcttaaggcacatggtccatatgtggcggccgaaaagatcactgctgttgatttgagcttggcaccaaagctgtaccatcttgaggttgctcttggccattttaagaagtggactgtcccaagcgacttgacttatgtcaacaactatatcaggctgctgttctcccgtgaatctttccagaagaccaaggcttcagaggaacatgtgattgctggctgggagcccaaggtcaatgcatga

SEQ ID NO: 2114 - protein, 212 aa, Ricinus communis
MALEICVKAAVGAPDTIGDCPFSQRALLTLEEKKIPYKCNLINLSDKPQWFLQISSEGKVPVLKVDDKWVPDSDVIVGLLEEKYPVPSLVTPPEFASVGSKIFPAFVKFLKSKDANDGSEQALLEELKALDEHLKAHGPYVAAEKITAVDLSLAPKLYHLEVALGHFKKWTVPSDLTYVNNYIRLLFSRESFQKTKASEEHVIAGWEPKVNA

SEQ ID NO: 2115 - DNA, 645 bp, Senecio aethnensis
atgggtattgagatctgtgtcaaagctgctactggtgcccctgatgttcttggagactgtccattttgtcagagggttttgttgactcttgaagaaaaaaaagtttcttatttgacccatctgattaacttgggcaacaaacctgactggtttcttgaagtgaacccagatggaaaagtgcctttgatcaattttgatgataaatggatttctgattctgatgttattgttggtcttattgaagagaaataccctgacccacctcttttaactccacctcaactctcttctgtgggatcaaagattttcccaaagtttgtggcattcttgaaaagcaaggacgagaacgatggaacagagcaggcgttgcttgatgagttgaaggcgttggatgaacaccttaaagataaagagggaccttatgttaacggagaaaagatctcagcggttgatttgagtttggcaccaaagctgtaccaccttgaggtggctcttggtcatttcaagaagtgggttgttcccgaaagtttgactcatgtgcataactatacaaagtcactcttttctcgagagtcatttgagaaaaccaaaccagctaaagatgaatacgtcatcgctggatgggcgccaaaggttaatgcatga

SEQ ID NO: 2116 - protein, 214 aa, Senecio aethnensis
MGIEICVKAATGAPDVLGDCPFCQRVLLTLEEKKVSYLTHLINLGNKPDWFLEVNPDGKVPLINFDDKWISDSDVIVGLIEEKYPDPPLLTPPQLSSVGSKIFPKFVAFLKSKDENDGTEQALLDELKALDEHLKDKEGPYVNGEKISAVDLSLAPKLYHLEVALGHFKKWVVPESLTHVHNYTKSLFSRESFEKTKPAKDEYVIAGWAPKVNA

SEQ ID NO: 2117 - DNA, 804 bp, Sorghum bicolor
atggctgcagggcacaagaacaccaccacagcgacgctcctagttctgctgctgtcattgatgctctctttgacagtgtcagtggcgcgactgtccattgctacggctgtggaggtgtgtgtgaaggctgctgtcggggctcctgacaagcttggcgactgtcccttctcgcagagggttctgctcactctggaggagaagaaagtaccttaccagttgaagctcattgacctcagcaacaagcctggatggtttctgaagatcagcccagagggtaaggtgcctgtgtataacggtggtgatggcaaatggattcctgattctgatgtgatcacccaagtcattgagaagaagtacccaactccatccctgatcacccctccagaatatgcatcagtgggatcaaagattttcccatccttcgttaagttcttgatgagcaagaatgctaaagatggttcagagaaggcacttctccatgagctgcaggcgctggagttgcatctcaaagctcacggccgcccctatatcagtgcgaagaatgtatcagctgttgatcttagcctggcgccgaagctgttccacctcgtggtggcgctggagcatttcaagcactggaaggtcccagaaagcctgtccaacgtacacgcctacaccaaggctctgttcagccgcgaatctttcatcaagactaagccaaccaaggagcacctgattgcgggatgggtggcccatggtgcccgtgtaagcccccgtgcccatggtgccttgttggtacctggtggacatccccggttgatctga

SEQ ID NO: 2118 - protein, 267 aa, Sorghum bicolor
MAAGHKNTTTATLLVLLLSLMLSLTVSVARLSIATAVEVCVKAAVGAPDKLGDCPFSQRVLLTLEEKKVPYQLKLIDLSNKPGWFLKISPEGKVPVYNGGDGKWIPDSDVITQVIEKKYPTPSLITPPEYASVGSKIFPSFVKFLMSKNAKDGSEKALLHELQALELHLKAHGRPYISAKNVSAVDLSLAPKLFHLVVALEHFKHWKVPESLSNVHAYTKALFSRESFIKTKPTKEHLIAGWVAHGARVSPRAHGALLVPGGHPRLI

SEQ ID NO: 2119 - DNA, 645 bp, Sorghum bicolor
atggccgccgtggaggtgtgcgtgaaggcagccgccgggaagcccgacacgctcggcgactgcccgttctcgcagagggtgctgctcacgctggaggagaagaaagtcccctacgaggtcaagctcgtcgacctcggcaacaagcccgaatggtttctggagattaacccagagggtaaggtgcctgtgctcaaaggtgatgatggtaaatgcattgctgattctgatgtaatcacccaagtcatcgaggagaagttcccaactccatctctggtcacccctccagaatatgcatcagtgggatcaaagattttcccagcctttgtcaagttcttgaagagcaaggatgctagtgatggttcagagaaggcgcttctggatgagctgcaggcactggatgagcatctcaaagctcatggcccttacatcaatggggacaatgtgtcagcggctgatctaagccttgcgccaaagctcttccacctccaggtcgcactagagcatttcaaaggctggaagatcccagaaaacctaaccaacgtccacgcctacaccaaggctcttttcagccgtgaatcttttgtcaagactaagccatccgaggagcacgtgattgcgggatgggcgcccaaggtgaacgcataa

SEQ ID NO: 2120 - protein, 214 aa, Sorghum bicolor
MAAVEVCVKAAAGKPDTLGDCPFSQRVLLTLEEKKVPYEVKLVDLGNKPEWFLEINPEGKVPVLKGDDGKCIADSDVITQVIEEKFPTPSLVTPPEYASVGSKIFPAFVKFLKSKDASDGSEKALLDELQALDEHLKAHGPYINGDNVSAADLSLAPKLFHLQVALEHFKGWKIPENLTNVHAYTKALFSRESFVKTKPSEEHVIAGWAPKVNA

SEQ ID NO: 2121 - DNA, 639 bp, Sesamum indicum
atggctgtggaagtatgcgtcaaggctgctgtaggcgctcccgacattcttggagactgtcccttttcccagagggttcttttgactttggaagagaagaaagtcccttataagctgcatttaatcaacgttgaccagaagccccaatggtttttggaagtgaacccagaagggaaggtgccagtgataaaattcgatgataaatggattgcagactctgatgtgattgttggtcttcttgaggagaaatacccgaacccttctctatctcctcctcctgaagtctcatctgtgggctccaaaatatttccttcttttgtcaaattcttgaagagcaaggatcctactgatggatcagaacaggctctgcttgatgaattgaaggcattggatgagcacctgaaagctaagggaccgtatgtcaatggagaaaatatttgtgctgttgatttgagtttggcaccaaagctttaccatcttgatgttgctcttgcccatttcaagaattggattgttcctgaaaacttgacccacgtgcacaactacctgaagttgctcttttctcgggactctttccagaaaacaaaggctgcaaaggaacacgttgtcgcaggctgggcacccaaagttaatgcatga

SEQ ID NO: 2122 - protein, 212 aa, Sesamum indicum
MAVEVCVKAAVGAPDILGDCPFSQRVLLTLEEKKVPYKLHLINVDQKPQWFLEVNPEGKVPVIKFDDKWIADSDVIVGLLEEKYPNPSLSPPPEVSSVGSKIFPSFVKFLKSKDPTDGSEQALLDELKALDEHLKAKGPYVNGENICAVDLSLAPKLYHLDVALAHFKNWIVPENLTHVHNYLKLLFSRDSFQKTKAAKEHVVAGWAPKVNA

SEQ ID NO: 2123 - DNA, 633 bp, Solanum tuberosum
atggctgttgaagtttgtgtcaaggctgctgtgggtgcccctgatgttcttggagactgtccatttagccaaagggtacttctgacattggaggaaaagaaagtgacttacaagaagcacttgatcaatgttagtgacaagcccaaatggttcttggaggtgaacccggaagggaaagttcccgtgatcaattttggtgacaaatggatcccggattctgatgtcattgttgggattattgaagagaaatacccaaatccctctctcattgctccccctgaatttgcctctgtgggctcaaaattatttcctaccttcgtctcgtttctgaagagcaaggattctagtgacggtactgagcaggctctccttgatgaactaaaggctttggaagagcatctcaaggctcatggaccatatgccaatgggcagaatgtttgttcagttgatatgagcttggctccaaaactgtaccatctcgaggtggctcttggacacttcaagaagtggagtgtgcctgaaagcttgagtcacgtgcgtaattacatgaagctgctcttcgagcgagagtcgttccagaataccaaggctgaagaaaagtacgtcatcgcagggtgggctccaaaggtttaa

SEQ ID NO: 2124 - protein, 210 aa, Solanum tuberosum
MAVEVCVKAAVGAPDVLGDCPFSQRVLLTLEEKKVTYKKHLINVSDKPKWFLEVNPEGKVPVINFGDKWIPDSDVIVGIIEEKYPNPSLIAPPEFASVGSKLFPTFVSFLKSKDSSDGTEQALLDELKALEEHLKAHGPYANGQNVCSVDMSLAPKLYHLEVALGHFKKWSVPESLSHVRNYMKLLFERESFQNTKAEEKYVIAGWAPKV

SEQ ID NO: 2125 - DNA, 627 bp, Triticum aestivum
atggccgccgtggaggtgtgcgtgaaggcagccgccgggaagcccgacacgctcggcgactgcccggtctcgcagagggtgctgctcacgctggaggagaagaaagtcccctacgaggtcaagctcgtcgacctcggcaacaagcccgaatggtttctggagattaacccatagggtaaggtgcctgtgctcaaaggtgatgatggtaaatgcattgctgattctgatgtaatcacccaagtcatcgaggagaagttcccaactccatctctggtcacccctccagaatatgcatcagtgggatcgaagattttcccagcctttgtcaagttcttgaagagcaaggatgctagtgatggttcagagaaggcgcttctggatgagctgcaggcactggatgagcatctcaaagctcatggcccttacatcaatggggacaatgtgtcagcggctgatctaagccttgcgccaaagctcttccacctccaggtcgcactagagcatttcaaaggctggaagatcccagaaaacctaaccaacgtccacgcctacgccaaggctcttttcagccgtgaatctattgtcaagactaagccatccgaggagcacgtgattgcgggatgggcg

SEQ ID NO: 2126 - protein, 208 aa, Triticum aestivum
MAAVEVCVKAAAGKPDTLGDCPVSQRVLLTLEEKKVPYEVKLVDLGNKPEWFLEINPGKVPVLKGDDGKCIADSDVITQVIEEKFPTPSLVTPPEYASVGSKIFPAFVKFLKSKDASDGSEKALLDELQALDEHLKAHGPYINGDNVSAADLSLAPKLFHLQVALEHFKGWKIPENLTNVHAYAKALFSRESIVKTKPSEEHVIAGWA

SEQ ID NO: 2127 - DNA, 639 bp, Triticum aestivum
atgaccgaggtctgcgtcaaggccgccgtcggccaccccgacacgctcggcgactgtcccttctcccagagggtgctgctcacgctggaggagaagaaggtgccctaccagatgaagctcatcgacgtcagcaacaagcccgactggttcctgaagatcaatccagagggcaaggtgcctgtgtataacggtggtgatggcaaatggattgctgattctgatgtgatcactcaagtcattgaggagaagtacccaactccatcacttgtgacccctgctgaatatgcatcagtgggatcaaagatcttctccacctttgtcacgttcttgaagagcaaggatgccagcgatggttcggagaaggcacttgttgatgagctgcaggcgctcgaagagcacctgaaggcccatggaccctacatcaatggggcgaacatctccgctgtcgatctcagcctggctccgaagctctaccatctccaggtcgccctggagcacttcaagggctggaaggtccctgaaaccctgaccagcgtccatgcctacaccgaggctctcttcagccgcgagtcgttcgtcaagaccaaggcgaccaaggagaacctgatcgccgggtgggcgccgaaagtgaacccgtaa

SEQ ID NO: 2128 - protein, 212 aa, Triticum aestivum
MTEVCVKAAVGHPDTLGDCPFSQRVLLTLEEKKVPYQMKLIDVSNKPDWFLKINPEGKVPVYNGGDGKWIADSDVITQVIEEKYPTPSLVTPAEYASVGSKIFSTFVTFLKSKDASDGSEKALVDELQALEEHLKAHGPYINGANISAVDLSLAPKLYHLQVALEHFKGWKVPETLTSVHAYTEALFSRESFVKTKATKENLIAGWAPKVNP

SEQ ID NO: 2129 - DNA, 639 bp, Trichilia hispida
atggccgtggaagtgtgcgttaaggcagctgttggtgctcccgataagcttggagattgtccgttttctcaaagggtacttctaactttggaagagaagaaagtagcatacaaatttcatctaatcgacacaagcaacaaaccgcagtggtttttggatttgaacccggaagggaaggtgccggtgatcaagatcgatgacaaatggattcccgactccgatgtcatcgtcggtataattgaagagaagtacccggaacctcctctatcttctccttctgaagtttcctcagtgggttccaagatcttctcttgttttgtcacatttttgaagagcaaggatcccagtgatggaagtgaagcggctttaatcaatgagttgaaggccttggatgatcatttgaaggctcatggtccttatgttgctggcgagaagatcactgctgttgatttgagtttggcaccaaagctttaccaccttgaggtagctcttggccatttcaagaagtggtctgtccctcaagaccttagtcacgttcataactacttgaaggcactattctctcgggagtcatttgtgaagaccaaggctcccacagaatatgtcattgctggatgggccccaaaggtcaacgcatga

SEQ ID NO: 2130 - protein, 212 aa, Trichilia hispida
MAVEVCVKAAVGAPDKLGDCPFSQRVLLTLEEKKVAYKFHLIDTSNKPQWFLDLNPEGKVPVIKIDDKWIPDSDVIVGIIEEKYPEPPLSSPSEVSSVGSKIFSCFVTFLKSKDPSDGSEAALINELKALDDHLKAHGPYVAGEKITAVDLSLAPKLYHLEVALGHFKKWSVPQDLSHVHNYLKALFSRESFVKTKAPTEYVIAGWAPKVNA

SEQ ID NO: 2131 - DNA, 642 bp, Taraxacum kok-saghyz
atggcgatcgagatctgctgcaaagctgctaccggagctcctgacgttcttggagactgtccgttttgtcaaagggttctttcgactctggaagagaagaaagtaacttacaccacccatctgattaatctggacaacaaacctcaatggtttctcgaagtgaaccccgacgggaaagttccgttgataaaattcgacgacaaatggatttccgattcagacgttatcgtgggtttgatcgaagagaagttccctgaaccttcactttcttcttcccctgaattcgcctctgtgggatcaaagattttcccaaagtttgtggcattcgtaaagagcaaagacaccaatgatgggtcagaacaagctttgattgatgaattgaagtcattggatgaacacctcaaggatcatggtccttacgtgaatggagaaaagatcacagccgttgatttgagtttggcaccaaagctttaccaccttgaggtcgctcttggtcatttcaagaagtggacagttcctgaaaatttgacacatgtgcataactacacaaaggccctttttgctttagagtcgtttgagaaaacaaaagctgctaaagaacatatgattgctggatgggcaccaaaggttaacaatgcatga

SEQ ID NO: 2132 - protein, 213 aa, Taraxacum kok-saghyz
MAIEICCKAATGAPDVLGDCPFCQRVLSTLEEKKVTYTTHLINLDNKPQWFLEVNPDGKVPLIKFDDKWISDSDVIVGLIEEKFPEPSLSSSPEFASVGSKIFPKFVAFVKSKDTNDGSEQALIDELKSLDEHLKDHGPYVNGEKITAVDLSLAPKLYHLEVALGHFKKWTVPENLTHVHNYTKALFALESFEKTKAAKEHMIAGWAPKVNNA

SEQ ID NO: 2133 - DNA, 642 bp, Taraxacum officinale
atggcgatcgagatctgctgcaaagctgctaccggagctcctgatgttcttggagactgtccgttttgtcaaagggttcttttgactctggaagagaagaaagtaacttacaccacccatctgattaatctggacaacaaacctcaatggtttctcgaagtgaaccccgacgggaaagttccgttgataaaattcgacgacaaatggatttccgattcagacgttatcgtgggtttgatcgaagagaagttccctgaaccttcactttcttcttcccctgaattcgcctctgtgggatcaaagattttcccaaagtttgtggcattcgtaaagagcaaagacaccaatgatgggtcagaacaagctttggttgatgaattgaagtcattggatgaacacctcaaggatcatggtccttacgtgaatggagaaaagatcacagccgttgatttgagtttggcaccaaagctttaccaccttgaggtggctcttggtcatttcaagaagtggacagttcctgaaaatttgacacatgtgcataactacacaaaggctctttttgctttagagtcgtttgagaaaacaaaagctgctaaagaacatatgattgctggatgggcaccaaaggttaataatgcatga

SEQ ID NO: 2134 - protein, 213 aa, Taraxacum officinale
MAIEICCKAATGAPDVLGDCPFCQRVLLTLEEKKVTYTTHLINLDNKPQWFLEVNPDGKVPLIKFDDKWISDSDVIVGLIEEKFPEPSLSSSPEFASVGSKIFPKFVAFVKSKDTNDGSEQALVDELKSLDEHLKDHGPYVNGEKITAVDLSLAPKLYHLEVALGHFKKWTVPENLTHVHNYTKALFALESFEKTKAAKEHMIAGWAPKVNNA

SEQ ID NO: 2135 - DNA, 651 bp, Thellungiella salsuginea
atggctctcgaagtctgcgtgaaagccgccgttggtgcccctgataaactcggcgactgcccgttcagccaaagggttcttctcaccctcgaggagaagagtctaccctacaaaattcatctgatcaatatctccgacaaacctcagtggttcttagacattagtcctcaagggaaagtaccagtgcttaagatcgacggcaagtgggtgtctgattctgacgtcatcgtcggtattctcgaggacaagtatcctgagccatctctcaagactcctcctcgatttgcctccgtgggatcccagattttcagtactttcgtagctttcttgaagagcaaagactcccatgacaaaaccgaacatgcgttgcttcatgagctagaagctctggagaatcatctcaagactcatgatggtccttttatcgccggggagagagtcaccgccgtggatctaagcttagcaccaaagctttaccatctcgaggtcgctcttggccatttcaaaagctggtctgtccccgggagcttgccccatgtccataactacatgaaagctctgttctctctcgactcgtttgagaagaaaaagaccgaggagaagtatgtgatttcgggatgggctccaaaggtccaccccttgaaccattag

SEQ ID NO: 2136 - protein, 216 aa, Thellungiella salsuginea
MALEVCVKAAVGAPDKLGDCPFSQRVLLTLEEKSLPYKIHLINISDKPQWFLDISPQGKVPVLKIDGKWVSDSDVIVGILEDKYPEPSLKTPPRFASVGSQIFSTFVAFLKSKDSHDKTEHALLHELEALENHLKTHDGPFIAGERVTAVDLSLAPKLYHLEVALGHFKSWSVPGSLPHVHNYMKALFSLDSFEKKKTEEKYVISGWAPKVHPLNH

SEQ ID NO: 2137 - DNA, 639 bp, Triticum turgidum
atgaccgaggtctgcgtcaaggccgccgtcggccaccccgacacgctcggcgactgtcccttctcccagagggtgctgctcacgctggaggagaagaaggtgccctaccagatgaagctcatcgacgtcagcaacaagcccgactggttcctgaagatcaatccagagggcaaggtgcctgtgtataacggtggtgatggcaaatggattgctgattctgatgtgatcactcaagtcattgaggagaagtacccaactccatcacttgtgacccctgctgaatatgcatcagtgggatcaaagatcttctccacctttgtcacgttcttgaagagcaaggatgccagcgatggttcggagaaggcacttgttgatgagctgcaggcgctcgaagagcacctgaaggcccatggaccctacatcaatggggcgaacatctccgctgtcgatctcagcctggctccgaagctctaccatctccaggtcgccctggagcacttcaagggctggaaggtccctgaaaccctgaccagcgtccatgcctacaccgaggctctcttcagccgcgagtcgttcgtgaagaccaaggcgaccaaggagaacctgatcgccgggtgggcgccgaaagtgaacccgtaa

SEQ ID NO: 2138 - protein, 212 aa, Triticum turgidum; identical to SEQ ID NO: 2128

SEQ ID NO: 2139 - DNA, 639 bp, Vitis aestivalis
atgtcttttgaagtctgtgttaaggctgctgccggtgatcctgaaattcttggagattgtccattcagccaaagggttcttctgactctggaggagaagaaggtgccctacaagatgcatctgatcaatgttaacgagaagccccaatggtttttggagatgaacccagaagggaaggtgccggtgatcaaagtggacgataaatgggtccctgactctgatgtcattactggggttcttgaggaaaaacatccatctcctcctctcgctcctcctcctgaacattcgtctgtgggatctaaaatatttcccgcttttgtcaagttcttgacgagcaaggatcctactgacggttcagagcaggctttgctggatgaattgaaggccttggatgaccatcttaaggatcatggtccttacatcaatggggaaaatatctgtgctgtggatttaagtttggccccaaagctgtaccatcttcaggtggctcttggccattacaagaactggactatccctgaaagcttgtctcatgtccacaattacatgaagttacttttctctcgggagtcctttgagaaaaccaaaccagcaccggaccatgtagttgcaggatgggcacccaaggtcaatgcatga

SEQ ID NO: 2140 - protein, 212 aa, Vitis aestivalis
MSFEVCVKAAAGDPEILGDCPFSQRVLLTLEEKKVPYKMHLINVNEKPQWFLEMNPEGKVPVIKVDDKWVPDSDVITGVLEEKHPSPPLAPPPEHSSVGSKIFPAFVKFLTSKDPTDGSEQALLDELKALDDHLKDHGPYINGENICAVDLSLAPKLYHLQVALGHYKNWTIPESLSHVHNYMKLLFSRESFEKTKPAPDHVVAGWAPKVNA

SEQ ID NO: 2141 - DNA, 639 bp, Vitis vinifera
atgtcttttgaagtctgtgttaaggctgctgccggtgatcctgaaattcttggagactgtccattcagccaaagggttctgctgactctggaggagaagaaggtgccctacaagatgcatctgatcaatgttaacgagaagccccaatggtttttggagatgaacccagaagggaaggtgccggtgatcaaagtggacgataaatgggtccctgactctgatgtcattactggggttcttgaggaaaaacatccatctcctcctctcgctcctcctcctgaacattcgtctgtgggatctaaaatatttcctgcttttgtcaagttcttgaagagcaaggatcctaatgacggttcagagcaggctttgctggatgaattgaaggccttggatgaccatcttaaggatcatggtccttacatcaatggggaaaatatctgtgctgtggatttaagtttggccccaaagctgtaccatcttcaggtggctcttggccattacaagaactggactatccctgaaagcttgtctcatgtccacaattacatgaagttacttttctctcgggagtcctttgagaaaaccaaaccagcaccggaccatgtagttgcaggatgggcacccaaggtcaatgcatga

SEQ ID NO: 2142 - protein, 212 aa, Vitis vinifera
MSFEVCVKAAAGDPEILGDCPFSQRVLLTLEEKKVPYKMHLINVNEKPQWFLEMNPEGKVPVIKVDDKWVPDSDVITGVLEEKHPSPPLAPPPEHSSVGSKIFPAFVKFLKSKDPNDGSEQALLDELKALDDHLKDHGPYINGENICAVDLSLAPKLYHLQVALGHYKNWTIPESLSHVHNYMKLLFSRESFEKTKPAPDHVVAGWAPKVNA

SEQ ID NO: 2143 - DNA, 645 bp, Zinnia elegans
atggcgattgagatctgtgtcaaagctgctactggtgcacctgatgatcttggagactgtccattttcccaaagggttcttttaactcttgaagaaaagaaagtcccttacaaaacccatctcattaatttggacaacaaaccagaatggtttgttgaagtgaacccagatgggaaagttcctttgataaagtttgatgagaaatgggtttctgattctgatgttattgtgggtttgattgaagagaagtatcctgaaccttctctttctacaccctctgaatttgcctctgtggggtcaaagatttttccaaagtttgtgggattcttgaagagcaaggatgagaaagatgggactgaacaggctttgcttgatgaactcaatgaattggaagaacaccttaagaaaaatgggccttacgttaacggagaaaagatctcggccgttgatttgagtttggcaccaaagctgtaccatcttaaggtggctcttggtcattttaagaagtggactgttcctgaaagtctgacccatgtgcatgactacatgaagtcgctcttctcgagggagtcgtttgagaaaacaaaacctgctaaagaagaatacgtagtagctggatgggcaccaaaggttaataatgcatga

SEQ ID NO: 2144 - protein, 214 aa, Zinnia elegans
MAIEICVKAATGAPDDLGDCPFSQRVLLTLEEKKVPYKTHLINLDNKPEWFVEVNPDGKVPLIKFDEKWVSDSDVIVGLIEEKYPEPSLSTPSEFASVGSKIFPKFVGFLKSKDEKDGTEQALLDELNELEEHLKKNGPYVNGEKISAVDLSLAPKLYHLKVALGHFKKWTVPESLTHVHDYMKSLFSRESFEKTKPAKEEYVVAGWAPKVNNA

SEQ ID NO: 2145 - DNA, 645 bp, Zea mays
atggccgccgtggaggtgtgcgtgaaggccgccacggggaagcccgacacgctcggcgactgcccgttctcgcagagggtgctgctcacgctggaggagaagaaggtcccctacgaggtgaagctcgtcgacctcgacaacaagcccgaatggtttctgaagatcagcccagagggtaaggtgcctgtgttcaacggtggtgatggcaaatgcatcgctgattctgatgtaatcacccaaaccattgaggagaagttcccaactccatctctggtcactcctgtagaatatgcatcagtgggatcaaagattttcccagccttcatcacattcttgaagagcaaggatgctagtgatggttccgagaaggcgcttctggatgagctgcaggcactggatgagcatctcaaagctcatggcccctacatcaacggggagaacgtatcagcagctgatcttagcatggggccaaagctcttccacctccaggtcgcactggagcatttcaaaggctggaagatcccagaaaatctaaccaacgtccacgcctacaccaaggtttttttcagccgtgaatcttttgtcaagactaagccatccgaggagcacgtgattgcaggatgggcgcccaaggtgaacgcgtaa

SEQ ID NO: 2146 - protein, 214 aa, Zea mays
MAAVEVCVKAATGKPDTLGDCPFSQRVLLTLEEKKVPYEVKLVDLDNKPEWFLKISPEGKVPVFNGGDGKCIADSDVITQTIEEKFPTPSLVTPVEYASVGSKIFPAFITFLKSKDASDGSEKALLDELQALDEHLKAHGPYINGENVSAADLSMGPKLFHLQVALEHFKGWKIPENLTNVHAYTKVFFSRESFVKTKPSEEHVIAGWAPKVNA

SEQ ID NO: 2147 - DNA, 645 bp, Zea mays
atggccgccgtggaggtgtgcgtgaaggccgccgcggggaaccccgacacgctcggcgattgcccgttctcgcagagggtgctgctcacgctggaggagaagaaggtcccgtacgaggtgaagctcgtcgacctcggcaacaagcccgaatggtttctgaacatcagcccagagggtaaggtgcctttgttcaacggtggagatggcaaatgcattgctgattctgatgtaatcacccaagtcattgaggagaagttcccgactccttctctggtcacccctccagaatatgcatcagtgggatcaaagattttcccagcctttgtcaagttcttgaagagcaaggatgctagtgatgggtcagagaaggcgcttctggatgagctgcaggcactggatgatcatctcaaagctcatggcccctacataaatggggagaacgtgtcagcgactgatcttagcctggggccaaagcttttccacctacagatcgcactggagcatttcaaaggctggaagatcccagaaaacctaaccaatgtccatgcctacaccaaggctcttttcagccgtgaatcttttgtcaagactaagccatccgaggagcacgtgattgcgggatgggcgcccaaggtgaatgcataa

SEQ ID NO: 2148 - protein, 214 aa, Zea mays
MAAVEVCVKAAAGNPDTLGDCPFSQRVLLTLEEKKVPYEVKLVDLGNKPEWFLNISPEGKVPLFNGGDGKCIADSDVITQVIEEKFPTPSLVTPPEYASVGSKIFPAFVKFLKSKDASDGSEKALLDELQALDDHLKAHGPYINGENVSATDLSLGPKLFHLQIALEHFKGWKIPENLTNVHAYTKALFSRESFVKTKPSEEHVIAGWAPKVNA

SEQ ID NO: 2149 - DNA, 798 bp, Zea mays
atggctatagggcacaagaacaccaccaaagtggcgctcctagttctgctgctgtcattgatgctctctttgacagcgtcagtggcgcgcaatctccaatggcgactgtccgtcgctacggctgtggaggtgtgcgtgaaggctgctgtcggggctcctgacaagcttggcgactgtcccttctcacaaagggtgctgctcactctggaggagaagaaggtcccttaccggatgaggctcattgacctcagtaacaagcctggatggtttctgaagatcagcccagagggcaaggtgcccgtgtacaacagcggcgatggcaaatggattgctaattctgatgtgatcacccaagtcatcgaggagaagtacccagccccgtctctggcgacgcctccagaatacgcatcagtgggatcgaagattttcccatccttcgtcaagttcttgatgagcaaggatgccagcgacgacggttcggaagaggcacttgtgcgtgagctgcaggcgctggaggagcatctcaaagcccacgggcgtccctacatcagcggggagagagtaacagccgccgacctcagcctggcgccgaagctcttccacctggtggtggcgctggagcatttcaagggctggaaggtgccagaaagcatgtccagcgtccacgcctacacccaggctatgttcagccgcgaatctttcatcaagactaagcccaccaaggagcacttgatcgcgggatgggcggcgaaggtgcccaagccgcccaacctcgtcgtgccttgctggctcatctga

SEQ ID NO: 2150 - protein, 265 aa, Zea mays
MAIGHKNTTKVALLVLLLSLMLSLTASVARNLQWRLSVATAVEVCVKAAVGAPDKLGDCPFSQRVLLTLEEKKVPYRMRLIDLSNKPGWFLKISPEGKVPVYNSGDGKWIANSDVITQVIEEKYPAPSLATPPEYASVGSKIFPSFVKFLMSKDASDDGSEEALVRELQALEEHLKAHGRPYISGERVTAADLSLAPKLFHLVVALEHFKGWKVPESMSSVHAYTQAMFSRESFIKTKPTKEHLIAGWAAKVPKPPNLVVPCWLI

SEQ ID NO: 2151 - DNA, 645 bp, Zinnia violacea; identical to SEQ ID NO: 2143

SEQ ID NO: 2152 - protein, 214 aa, Zinnia violacea; identical to SEQ ID NO: 2144

SEQ ID NO: 2153 - DNA, 645 bp, Allium cepa
atggctcccgttgaattattgatcaaggccgcctatggacatcctgaagccattggcgattgtccttttagtcagagagtaactctaactcttgaggagaagaaaattccatacgagcacaagctagttgacctcagtaataaacccagctggtttttggaaatcaatccagaaggaaaagtgcctgtgtataaggatgaagaaggaaaatggattgcagattctgatgtgattactaaaatcattgaagagaagtatccagaaccatctttggttactccacctgaatattcttcagtgggatcaaaaatatttcctgcttttatcaagttcttgaaaagcaaggatcctaatgatggaagcgagcaggttttgcttgctgaactgaaagctttggatgatcatctcaaggctcatgggccatttattaacggtgagaacatatccgcagctgacttgagcttggcacccaaactgtaccatcttgatattgcacttgatcatttcaaaggatggaaagttccagaaagtttggctaatgttaacgcttacatgaagctccttttcagccgtgaatcctttgaaaagactaaagctgcaagagaacatgtcattgctggttgggtaccgaaggtaaacgcttga

SEQ ID NO: 2154 - protein, 214 aa, Allium cepa
MAPVELLIKAAYGHPEAIGDCPFSQRVTLTLEEKKIPYEHKLVDLSNKPSWFLEINPEGKVPVYKDEEGKWIADSDVITKIIEEKYPEPSLVTPPEYSSVGSKIFPAFIKFLKSKDPNDGSEQVLLAELKALDDHLKAHGPFINGENISAADLSLAPKLYHLDIALDHFKGWKVPESLANVNAYMKLLFSRESFEKTKAAREHVIAGWVPKVNA

SEQ ID NO: 2155 - DNA, 732 bp, Allium cepa
atggctcctgtcgagttgttaatcaaagccgccgccggtcaccctgataccctcggagactgtcctttttgtcaaagggttactctcactctcgaggagaagaaaattccttatgattataagctagttgatcttagcaataaacccagctggttcttggaagtcaatccagatgggaaagtaccagtctacaaagatgatgaagggaagtggatttcagattctgatgtgatcaccaaaatcattgaagaaaagtttcctgtgccatctttggttacctcacccgaatattcttcagtggggtcaaatatattttcttctttcatcaaattcctgaaaagcaaggattctgatgatggaacagagcaggctttgcttgcagaactgcaagctttagatgatcaccttaaggctcatgggccatttattgatggtgaaagcatctccgcggctgacttgagcttgggacctaagttgtatcatcttgatatcgcactcgatcatttcaaaggctggaaagttcctgatagtttgacaaattttaatgcttacatgaagctcctgtttagtcggaaatcatttgaaaagactaaggctgcgagagaacatgtcattgctggctgggcgccaaaactaaacgcttggatgtgctatcatacagtctttactgtcttaaatggatggatgtattcaggttttatgaacttggcttggtggtacatgcatgcctaa

SEQ ID NO: 2156 - protein, 243 aa, Allium cepa
MAPVELLIKAAAGHPDTLGDCPFCQRVTLTLEEKKIPYDYKLVDLSNKPSWFLEVNPDGKVPVYKDDEGKWISDSDVITKIIEEKFPVPSLVTSPEYSSVGSNIFSSFIKFLKSKDSDDGTEQALLAELQALDDHLKAHGPFIDGESISAADLSLGPKLYHLDIALDHFKGWKVPDSLTNFNAYMKLLFSRKSFEKTKAAREHVIAGWAPKLNAWMCYHTVFTVLNGWMYSGFMNLAWWYMHA

SEQ ID NO: 2157 - DNA, 645 bp, Cryptomeria japonica
atgacaggggctttggatatctgtgctaaggctgcggtgggtgcaccggataaacttggggactgcccatttacgcagagggtcttgctgactttggaggaaaagcatatcccatacaacacgaagttgataaacctcagtgataagcctgactggttcttacaaattagtcccgaaggaaaagttcctctcattaagattgacgacaagtggattccagattctgatgttatcacccagatattggaggagaaatatcccgagccatctctggcaactccgcctgagaaggcatcagtagggtcgaagattttcccaacattcattggcttcttgaaaagtcgtgatcctaatgatggcaaagagcaagccttattggatgagttgcgtgccttggatgaatacctgaaagctaatggtccatttattgacggggagagagtttctgcggtggacctgagtcttgctccaaagttataccatttgaagattgttttgggtcacttcaaaaagtggtctattccggaagagttttcttatgttcacaactacataaaggctcttttctctcgagaatcatttcttcatacacaggctgccgaggaatatgttattgcaggctgggcgccaaaagttaatgcttaa

SEQ ID NO: 2158 - protein, 214 aa, Cryptomeria japonica
MTGALDICAKAAVGAPDKLGDCPFTQRVLLTLEEKHIPYNTKLINLSDKPDWFLQISPEGKVPLIKIDDKWIPDSDVITQILEEKYPEPSLATPPEKASVGSKIFPTFIGFLKSRDPNDGKEQALLDELRALDEYLKANGPFIDGERVSAVDLSLAPKLYHLKIVLGHFKKWSIPEEFSYVHNYIKALFSRESFLHTQAAEEYVIAGWAPKVNA

SEQ ID NO: 2159 - DNA, 774 bp, Chlamydomonas reinhardtii
atgctttcttccaagaccttgaaccttacgcttgcaccaaagttctccagcttccgtcgaggactcgtgcttccgcgccactcgattaaagcaatggcgacccccgtgaccaccatctatgtcaagggcgacccggccaagaacaagctgctggactgccccttctgccaccgcgtgctactggcgtacgaggccaagaagctaccctacaagatggagtacattgacttcgacaacaagcccgcctggctgctggaggccagcggcggcaaggttcccgtgatcaaggagggtcccgatgcgccgtacatgcctgacagcgatgtcattgtggtgcacctggagaagcagcaccccgagccctcgctgcagtcctccgtgccagcagaaatcggcgccaaactgttccccaacttccgtgccatcctgatcggcccggcggcggaggtggccgacaaggtggccgcgctggaggagcagctggcgggcatggatgactacctgaggcagcacgaggcccagggtccgctgttcggcgggcagcacctcaacggcaccgactgttcgctggcgcccaagctataccatgctgtggtagcgctcaagcacttcaagggctgggagctgccggccaggttcacggcgctgcacaagtacttggccgcactcaaggcgctgcccgagtggcagcatgtggactacggcacagaggccatcatcgccggctgggagcgccacatcaagcacgcggcggcgggcacggggcatcactga

SEQ ID NO: 2160 - protein, 257 aa, Chlamydomonas reinhardtii
MLSSKTLNLTLAPKFSSFRRGLVLPRHSIKAMATPVTTIYVKGDPAKNKLLDCPFCHRVLLAYEAKKLPYKMEYIDFDNKPAWLLEASGGKVPVIKEGPDAPYMPDSDVIVVHLEKQHPEPSLQSSVPAEIGAKLFPNFRAILIGPAAEVADKVAALEEQLAGMDDYLRQHEAQGPLFGGQHLNGTDCSLAPKLYHAVVALKHFKGWELPARFTALHKYLAALKALPEWQHVDYGTEAIIAGWERHIKHAAAGTGHH

SEQ ID NO: 2161 - DNA, 876 bp, Ceratopteris richardii
atgaaggcaataatagctgcgtcctccaccacggttccccttgcgaccgtttcacgccattgccatagtcccttgaatccgtccctgccgtctatatcttctgccctcaagtatttcccgctgtctagtcgtttcgcagttgctgctccctgttcgtctctatactacgatcgaggattttccagagcgtctgtcgtgaaacgatcccatctatcgacctacatggcgtccgccgcagttgagcccgtcgaagtactcgtgaaagctgcaactggagagcccgagaagcttggtgactgtccgttttcgcaaagagtcttgttgactctagaggaaaagaaagtcccgtatacccttaagcttgttgatctgtccaacaagccagactggtttacagaagttaatccggagggcaaggtccccgtcatcaagcatgaggggaagtgggttccagactctgatgtaataacgcagattatcgaagagaagtttcctgaaccgccactgcagacgcctgctgagaaggcatcagctggaggaaaggtctttccgtgttttgtcaagttccttaagagcaaagattcttctgatggtactgaggaggcgctggttgctgaactgaagagcttgaacgagcatctaaaggagcatggcccgtatatagctggagaaaacgtaacagcggcagatctgagcttatcacccaaattgcttcacttgaaggttgctttaggtcactacaagaattggtccatccccagtgatttgacctatctattgacatatattgagactgttcatgctcgtgaatcctttacgaagaccagagcagcggacgagtatattgtcgctggatgggccaaacacctggcttga

SEQ ID NO: 2162 - protein, 291 aa, Ceratopteris richardii
MKAIIAASSTTVPLATVSRHCHSPLNPSLPSISSALKYFPLSSRFAVAAPCSSLYYDRGFSRASVVKRSHLSTYMASAAVEPVEVLVKAATGEPEKLGDCPFSQRVLLTLEEKKVPYTLKLVDLSNKPDWFTEVNPEGKVPVIKHEGKWVPDSDVITQIIEEKFPEPPLQTPAEKASAGGKVFPCFVKFLKSKDSSDGTEEALVAELKSLNEHLKEHGPYIAGENVTAADLSLSPKLLHLKVALGHYKNWSIPSDLTYLLTYIETVHARESFTKTRAADEYIVAGWAKHLA

SEQ ID NO: 2163 - DNA, 798 bp, Chlorella vulgaris
atgatcaacagtgcaagccgagccattgtgcgccctgttgtaggtccgacaaaggcccagatcaagaacgtcccatcactcgtcaagtctagtccaaccacaagaagaggtgctctgcgtctgtgcgttgcaatggcgacgagtcccatcattgaagcctacgtgaaaggaaatcctgaggcgcacgagcgaggcgattgccccttttcgcaccgcgcgctgctgacacttgcagagaagcacgtcccgtacaaggaagagtacattgacttcagcaacaagccaaagtggctctttgacatcaatcccaaggggagcgtccccatcatccatgacctggaggaagacagctggatcccagacagtgcagccattgtggactacctggaggagcgcttccctgagccgcctcttggcaagcatgatgcacctcctcatgtgggagagaccttgttccccagctttgtggcggcgctgaaggccaagaagggcacagatgaagagtccaagaagatcggcaccttggtccagtcgctggaggagatcaacaactatttgaaggacaacaaaaaggagtaccttggtggcgcgaggcccaaccaggcggacctgggccttgcaccaaagctctaccacgtcgagcatgctatgagggaatacaagggctgggagatcccagatgagctcactgctctcaaggaatacaaccagaggatcaggagccgcgagagttggaagcagacttactacccgccagagaaggtcgttcagggatggaaagctcacctggaggcttga

SEQ ID NO: 2164 - protein, 265 aa, Chlorella vulgaris
MINSASRAIVRPVVGPTKAQIKNVPSLVKSSPTTRRGALRLCVAMATSPIIEAYVKGNPEAHERGDCPFSHRALLTLAEKHVPYKEEYIDFSNKPKWLFDINPKGSVPIIHDLEEDSWIPDSAAIVDYLEERFPEPPLGKHDAPPHVGETLFPSFVAALKAKKGTDEESKKIGTLVQSLEEINNYLKDNKKEYLGGARPNQADLGLAPKLYHVEHAMREYKGWEIPDELTALKEYNQRIRSRESWKQTYYPPEKVVQGWKAHLEA

SEQ ID NO: 2165 - DNA, 687 bp, Chlorella vulgaris
atgctcaagatgcactcgtcattcgttgcgttcaggtatgtcaaggggtcaccagagaagggggagcttggagactgccccttctcacaccgcaccatgctgaccctggaagagaagggcgttccctacaacaagctcctcctcgacgagctcaacatgcccgagtggatcgcagaagtgacagagggcaagagcacaatcccctttgccaccgagctggagactggcaagtggctctatgacagcgacaagattgtgccgtacttggaggacaagttcccggagcgcaagctgggcaagcccgatgaggtgccccaagtgggagcgaacctcttcccggcgttcatggagtatgtcaagaccactgacaaagctgacgaggacaagaagcgcgaggcgctgatcgcggagctgaaatcgatcgattcggaattgaaaaagagtgagggtccgtacgtggggggccaggatgtgaacgctgcggacctgaagctgggcccgcagctgaagcacgtcatcatcgggtccaaggccgtaaagcaatgggagctgcccaaggagctgacggccatccacacgttcatggaggccattcagaagcgtgagtcatggaagaacacctactacaccgagaagtatgtggccgacggctggcacaagaagctggagaccatgggtgtcaagtga

SEQ ID NO: 2166 - protein, 228 aa, Chlorella vulgaris
MLKMHSSFVAFRYVKGSPEKGELGDCPFSHRTMLTLEEKGVPYNKLLLDELNMPEWIAEVTEGKSTIPFATELETGKWLYDSDKIVPYLEDKFPERKLGKPDEVPQVGANLFPAFMEYVKTTDKADEDKKREALIAELKSIDSELKKSEGPYVGGQDVNAADLKLGPQLKHVIIGSKAVKQWELPKELTAIHTFMEAIQKRESWKNTYYTEKYVADGWHKKLETMGVK

SEQ ID NO: 2167 - DNA, 675 bp, Chlorella sp.
atggcctcggccgcggagcccaagtatgacattgctgtgaaggctgtgggcggcaagctggccgactgcccgttctgccaccgctcgctgctgacgctcgaagagaaacacgtaccgtacaccaagaccttcattgactttgccaacaagccgcagtggctgctggatgtcaaccctgccggcagcgtgcccgtcatgaaggagctggccaccggggagtggattgtggacagcggcacaattcaggactaccttgaagagaagttcccagatccaccgttgggcacggcagaggactcgccgcagatcgggctggatgtgctgggcaagtttggggccttcatcaagtcgagccccgaggaggcggcggagaaggaggcggacctggtggagtgcctgcgcgggctggacgcgcacctgacggcgcacggacccttcatcggcggcgctgcgccctgtgccaccgactgcgcagtcatgccgcgcctgtaccacatgcaagtggggaccaagtacttcagggactgggagatgcctgctgagctggcggcgctgaggcagtacatggacaccttcatgtcgcgggacagctggaagaacacctactacagcccggagatggtcattgcagggtgggaggcccacggcatcaagaagctcgtgcccgcgcagtga

SEQ ID NO: 2168 - protein, 224 aa, Chlorella sp.
MASAAEPKYDIAVKAVGGKLADCPFCHRSLLTLEEKHVPYTKTFIDFANKPQWLLDVNPAGSVPVMKELATGEWIVDSGTIQDYLEEKFPDPPLGTAEDSPQIGLDVLGKFGAFIKSSPEEAAEKEADLVECLRGLDAHLTAHGPFIGGAAPCATDCAVMPRLYHMQVGTKYFRDWEMPAELAALRQYMDTFMSRDSWKNTYYSPEMVIAGWEAHGIKKLVPAQ

SEQ ID NO: 2169 - DNA, 648 bp, Pinus bungeana
atggctgaagcactggaagtctttgttaaggctgccacgggtgcacctgacaagcttggggactgtccctttagccaaagggttttgcttactctcgaggaaaaacaggtcccatacaacatgaagttgattgataccagtaacaaacctgaatggtttttgcagataaaccctgaaggcaaagttcctgtcatcaagatcgatgataagtggattccagactccgatgttataacccagatattggaggaaaagtacccggaaccacctttggcaaccccacctgagaaggcaactgttgggtcaaagattttctcaacatttattggcttcttgaaaagcaaggaccctaatgatggcacagagcaagccttattgaatgaattgcgtgcattcgacgaatacctaaaagacaacgggccatttattaatggggagaaaatatctgcagcggacctcagcctagcgccaaagctttaccatatgaaggttgccttaggtcacttcaaaaagtggtctgttcccgaagagttcacttatgtccagagttacatgaaggctgtcttctctcgagaatcatttcagcgtacaaacgctgcagatgagcaatatattattgcgggttggtttccaaaggtcaatgcttaa

SEQ ID NO: 2170 - protein, 215 aa, Pinus bungeana
MAEALEVFVKAATGAPDKLGDCPFSQRVLLTLEEKQVPYNMKLIDTSNKPEWFLQINPEGKVPVIKIDDKWIPDSDVITQILEEKYPEPPLATPPEKATVGSKIFSTFIGFLKSKDPNDGTEQALLNELRAFDEYLKDNGPFINGEKISAADLSLAPKLYHMKVALGHFKKWSVPEEFTYVQSYMKAVFSRESFQRTNAADEQYIIAGWFPKVNA

SEQ ID NO: 2171 - DNA, 678 bp, Picea glauca
acgactgaggatctttatcatcttccacagtaacacaaattgttgaggatctttatcatcttcagactaagaatattgattcacaaagatttggagaaactctgatgtatacacacttcatatatccatgagtatacatttacaaacaaatcttccacatttaagcagctacataaaacgaacctaatcattaagagtattgattcacaatgatttggagaaactctgatgtatacacacttcatatatccacgagtatacatttacaaataaatcttcctcatttaagcagctaaataaaactaacctaatcattaagagtggtcaatggatatgtattgagaagcttgctcattaggaagcattggcgattttctctggtaagttaaatttcgcgcgccacccttgaatgatcatgtcattgggataattggtcttctcaaagctctctctggattccatccgattcatgtagttctgcagtgcgccgagctcccggggaaattgaaagtccatgaagtgggctaaggccactcgggcatggcgaagcttaggtgccaacgcaaaatctgaatccgtaggcctcctcccagctatatatggtccatggttctgcaaatggcgatcgaaccctacgagctcatccacaaattcatctctacatgcgctgttgggatc

SEQ ID NO: 2172 - protein, 225 aa, Picea glauca
MSDLQIFSKAAPGTGSPSKERGDCPFSQRIFLELEELGLPYTATYIQEGADKPHWFMEKNPSGLMPVLRDRETWIQDSDKIAQYLDDHYAENTLRTQVEFKNVGSKIFPIFTKWLQCKDPNSACRDEFVDELVGFDRHLQNHGPYIAGRRPTDSDFALAPKLRHARVALAHFMDFQFPRELGALQNYMNRMESRESFEKTNYPNDMIIQGWRAKFNLPEKIANAS

SEQ ID NO: 2173 - DNA, 648 bp, Picea glauca
atggctgaagcactggacgtctgtgttaaggctgccaccggtgtgcctgacaagcttggggactgtccctttagccagagggttttgcttactctagaggaaaaacaggtcccatacaatacgaagcttattgataccagtaacaaacctgactggtttttgcagataagccctgaaggaaaagttcctgtcctgaagatcgatgataagtgggttccagactccgacgttatcacccagatattggaggaaaagtacccggaaccacctttggcaaccccaccagaaaaggcaactgtagggtcaaagatcttctcaacgttcatccccttcttgaaaagcaaggaccctaatgatggcacagagcaagccttattgaatgaattgcgtgccttggacgaacacctaaaagataatgggccatttattaatggagagaaaatctctgcagtggacattagcctagcaccaaagctttatcatttgaaggttgccctaggtcacttcaaaaagtggtctgttccagaagagctcacttatgtccgagattacatggagactctcttctctcgagaatcttttttgcgtacaagtcctccagatgagcaatacattattgcgggttggtttccaaaggttaatccttaa

SEQ ID NO: 2174 - protein, 215 aa, Picea glauca
MAEALDVCVKAATGVPDKLGDCPFSQRVLLTLEEKQVPYNTKLIDTSNKPDWFLQISPEGKVPVLKIDDKWVPDSDVITQILEEKYPEPPLATPPEKATVGSKIFSTFIPFLKSKDPNDGTEQALLNELRALDEHLKDNGPFINGEKISAVDISLAPKLYHLKVALGHFKKWSVPEELTYVRDYMETLFSRESFLRTSPPDEQYIIAGWFPKVNP

SEQ ID NO: 2175 - DNA, 699 bp, Physcomitrella patens
atggctgcaaacgctggcttggatttggaagcttttggcaaggccaagtccggatccggcagccctagcaaggagcgaggagattgcccattctcgcaacgcatctacatcgaattggaagagaagaaactaccctacacagctacttacatcgaagaaggcgaaaacaagcctgactggtttatggagaagaaccctaaaggtctgatgcctgtgcttcgcgatggggacgaatggattcaagattctgacaagatagctgagcatcttgagaaaaagtatccggaagtgtccctggcgactcctaaggagtacaaacaaattggattgaacatcttccaagccttcacaacctatctaaagagcaagaatgctgatgaccaatccaagcaggagttgttgaaggagcttgctgctctggatcagcatttgcaaaccaagggtccatatattgccggagaaaatccaaccgactctgattatgcattgatccctaaactgcaccacatgagagtgtcactagcccattacatgggcttcaaaatcccatctgagcacaaagctttgcataaatacatcaagttgctcgaaagtcgcccaagcttccagaaaactaactcacccgacgacatgatcatcgaaggatggcagaagaagttcggccttcccgaccgtgtggtggagccagcaagtgcttaa

SEQ ID NO: 2176 - protein, 232 aa, Physcomitrella patens
MAANAGLDLEAFGKAKSGSGSPSKERGDCPFSQRIYIELEEKKLPYTATYIEEGENKPDWFMEKNPKGLMPVLRDGDEWIQDSDKIAEHLEKKYPEVSLATPKEYKQIGLNIFQAFTTYLKSKNADDQSKQELLKELAALDQHLQTKGPYIAGENPTDSDYALIPKLHHMRVSLAHYMGFKIPSEHKALHKYIKLLESRPSFQKTNSPDDMIIEGWQKKFGLPDRVVEPASA

SEQ ID NO: 2177 - DNA, 660 bp, Physcomitrella patens
atggctgctgctgctgccgaggctgcacccacggaggtcttcgtcaaggccgctgtcgggcacccggacaagttcggtgattgtcccttttcacatagggtggtgctgactctggcggagaagaaagttccatacgacatgaaactaattgacgtttcaaacaagcctcaatggttcttagatatcaatccggagggaaaagtacctgtcatcaaggatgaaggaaagtttgtggctgactcggatgtcatcactcagcttcttgaggaaaaatatccggagccttgtttgaagacgcccgaggacaaggcttccgcaggtgcgaggatcttcccaaattttgcagcattcttgaaaagcaaagaccctaacgatggcaccgaggcagcattgcttgctgagctcaagagtctggatgaacatctcaaatcgaacaaacctttcattgctggcgaggcagtgacagcggctgacttggcgctggcccccaagctccaccacttgacagtcgctcttggtcattacaaaaagtggtccatacctgaggatttgaccaatgtgttgagctacgttgaggctgtccattcactagagtcctttaagaagactaagccagctgacgaattcatcattgcgggatgggccaaattttttgtttga

SEQ ID NO: 2178 - protein, 219 aa, Physcomitrella patens
MAAAAAEAAPTEVFVKAAVGHPDKFGDCPFSHRVVLTLAEKKVPYDMKLIDVSNKPQWFLDINPEGKVPVIKDEGKFVADSDVITQLLEEKYPEPCLKTPEDKASAGARIFPNFAAFLKSKDPNDGTEAALLAELKSLDEHLKSNKPFIAGEAVTAADLALAPKLHHLTVALGHYKKWSIPEDLTNVLSYVEAVHSLESFKKTKPADEFIIAGWAKFFV

SEQ ID NO: 2179 - DNA, 660 bp, Physcomitrella patens
atggcgtcccgatgtcagcgattgaaggtgtatgtgaaggcagctactggcaacccatgcaagcttggagactgtccgttttctcaaagagtgctgataacgtgtgaactgaaaaacattgcttacgatgtgaagtttgtcgatctggacaggaagcctgaatggttcttgaggataaatccggaagggagagttccagttatcaaaattaatggagactacatacccgactcagatatcatcgtggacgttctggagaagtcgtacccctatccccctctttctacctgtcgaaacatcacttgcaggggccagaacatcttcccggccggaatggcgttcttcaagagcaaaaaccccaggtgcgatggcacagaatcgcagttcgtatgcgagcttgaccacatgaaccatcacctttgcaacgagggtccatacatagcggggcaatacgtgacctcggccgacattgcgctggcgccacagctgtatgtcttgcagaccgccctggcatactacaagaactggaccaacttcgagcaattctaccctgccttgaacctattcatgaagaatatgtatgcgcttccggccttcatgcaaacagctcctgcacctgaggtggtgatccaaggctgggccaagcactggtcatgctag

SEQ ID NO: 2180 - protein, 219 aa, Physcomitrella patens
MASRCQRLKVYVKAATGNPCKLGDCPFSQRVLITCELKNIAYDVKFVDLDRKPEWFLRINPEGRVPVIKINGDYIPDSDIIVDVLEKSYPYPPLSTCRNITCRGQNIFPAGMAFFKSKNPRCDGTESQFVCELDHMNHHLCNEGPYIAGQYVTSADIALAPQLYVLQTALAYYKNWTNFEQFYPALNLFMKNMYALPAFMQTAPAPEVVIQGWAKHWSC

SEQ ID NO: 2181 - DNA, 870 bp, Picea sitchensis
atggccatggtatccatgcttggtaaagctcccactcttggtgtagcttccacttcgtctctcaccgtagcaaaaaatctgcgctgtgactctcttgaatcacttgttttatatcgtagagcctttaattgcggtcttttaacccagttgtttggcgagagaggggttcgatctagggtcttgcttcagaagaggaagattgccagtacacgaattgtgagcatggctgaagcactggacgtctgtgttaaggctgccaccggtgtgcctgacaagcttggggactgtccctttagccagagggttttgcttactctagaggaaaaacaggtcccatacaatacgaagcttattgataccagtaacaaacctgactggtttttgcagataagccctgaaggaaaagttcctgtcctgaagatcgatgataagtgggttccagactccgacgttatcacccagatattggaggaaaagtacccggaaccacctttggcaaccccaccagaaaaggcaactgtagggtcaaagatcttctcaacgttcatccccttcttgaaaagcaaggaccctaatgatggcacagagcaagccttattgaatgaattgcgtgccttggacgaacacctaaaagataatgggccatttattaatggagagaaaatctctgcagtggacattagcctagcaccaaagctttatcatttgaaggttgccctaggtcacttcaaaaagtggtctgttccagaagagctcacttatgtccgagattacatggagactctcttctctcgagaatcttttttgcgtacaagtcctccagatgagcaatacattattgcgggttggtttccaaaggttaatccttaa

SEQ ID NO: 2182 - protein, 289 aa, Picea sitchensis
MAMVSMLGKAPTLGVASTSSLTVAKNLRCDSLESLVLYRRAFNCGLLTQLFGERGVRSRVLLQKRKIASTRIVSMAEALDVCVKAATGVPDKLGDCPFSQRVLLTLEEKQVPYNTKLIDTSNKPDWFLQISPEGKVPVLKIDDKWVPDSDVITQILEEKYPEPPLATPPEKATVGSKIFSTFIPFLKSKDPNDGTEQALLNELRALDEHLKDNGPFINGEKISAVDISLAPKLYHLKVALGHFKKWSVPEELTYVRDYMETLFSRESFLRTSPPDEQYIIAGWFPKVNP

SEQ ID NO: 2183 - DNA, 681 bp, Pinus taeda
tgaattgcatgttgtaacgggagaccctcagataaacgaaacaccaatttcattaagactaaggagatgtcatcgtagcagcaggagtgaggatctttattatcttcaccaataacacactttattgacaagccagggtaacacgggtggggcactttttctagattcggagtgagaatcttcatcgaagacgacgatttggagaaactcgtctgtatacgcacttcatacataaataagtttcagtttcatatatccatacatttacagacaaatcgtccacatttaaaagtggtctagggatataaattgagaagcttgctcagttgggaacattggcgattttctctggtaagttaaatttcgcacgccacccttggatgatcatttcatccggataattggtcttctcaaagctctctcgagattccatccgattcatgtagttctgcagtgcgccgagctcctggggaaattgaaagtccatgaagtgagccaaggccactcgggcatggcgaagcttaggtgccaacgcaaaatctgaatccgtaggcctctctccagctatatatggtccatgtttctgcaaatggcgatcaaacagtacgagctcctccacaaattcatctctacaggggctgccgggatccttggtttggagccattttgtaaatatcggaa

SEQ ID NO: 2184 - protein, 226 aa, Pinus taeda
MSDLEVFGKAAPGTGSPSKERGDCPFSQRVFLELEELGLPYTATYIQEGPNKPHWFMVKNPSGLMPVLRDGETWIQDSDKIAEYLDKHYAENTLKTPVEFRDVGSKIFPIFTKWLQTKDPGSPCRDEFVEELVLFDRHLQKHGPYIAGERPTDSDFALAPKLRHARVALAHFMDFQFPQELGALQNYMNRMESRESFEKTNYPDEMIIQGWRAKFNLPEKIANVPN

SEQ ID NO: 2185 - DNA, 837 bp, Pinus taeda
atgcttagtgtagcttccacttcgtctctcgctgtagcaaagaatctgcgctgcgactctcttgaatcactggttttgtatcgtagagcctttaattgcggtctcgtaacccatccgtttggcgagaaaggggttagatccagggtcttgcttcagaggaggaagattggcagtacacgaattgtgagcatggctgaagaactggaagtctgtgttaaggctgccacaggtgcacctgataagcttggggactgtcccttcagccagagggttttgcttactctcgaggaaaagcaggtcccgtacaagatgaagttcattgataccagtaacaaacctgactggtttttgcagacgaaccctgaaggaaaagttcctgtcatcaagatcgatgataagtggattccagactctgatgttataacccagatattggaggaaaagtacccggaaccacctttggcaaccccacctgagaaggcaactgtagggtcaaggattttctcaacattcatcggcttcttgaaaagcaaggaccctaatgatggcacagagcaagccttattgaacgaattgcgtgccttcgacgaatacctaaaagacaacgggccatttattaatggagagaaaatctctgcagcagacctcagcctagccccaaagctttatcatttgaaggttgccctaggccacttcaaaaagtggtctgttccagaagagttcacttatgtccagaattatatgaaggctctcttctctcgagaatcatttcagcgtacaaacgctgcagatgagcaatatattattgcgggttggtttccaaaggttaatccttaa

SEQ ID NO: 2186 - protein, 278 aa, Pinus taeda
MLSVASTSSLAVAKNLRCDSLESLVLYRRAFNCGLVTHPFGEKGVRSRVLLQRRKIGSTRIVSMAEELEVCVKAATGAPDKLGDCPFSQRVLLTLEEKQVPYKMKFIDTSNKPDWFLQTNPEGKVPVIKIDDKWIPDSDVITQILEEKYPEPPLATPPEKATVGSRIFSTFIGFLKSKDPNDGTEQALLNELRAFDEYLKDNGPFINGEKISAADLSLAPKLYHLKVALGHFKKWSVPEEFTYVQNYMKALFSRESFQRTNAADEQYIIAGWFPKVNP

SEQ ID NO: 2187 - DNA, 726 bp, Selaginella moellendorffii
atggcttcgcaggatgtggatcttgaagttttcggcaaggcggctactgggactggaagccccagcaaccaacggggagattgtccattctctcagcgagtttacatggttctggaagagaaacatcttccttacaaggcaacttatgtcgaggaaggacccaacaagcctgactggtttatgcaacacaatccctctggcttgatgccggttctccgtgacgctgctgattggattcaagactcggacaagatctttgagcatgtggagaacaagttcaaggagccgtccctgaaaactccagacgagttcaagagcgtcggggctggcatctttccagcgttcacaaactggctcaagtccaaggaccgaaacgctccagcgaagcaagagtttatcaacgagctcacagctctcgaggagcacttgaagaagcacggcccttacatcgctggaaagaatcccaccgattccgactttgctttggctccaaagcttcgtcacgctagagtggctcttaagcacttcatagacttcgtcttccccagcaatctccagcatgtcgcaaaatacatcgagctcatggaaacgaggccaagcttcaagaagacggattctccagacgagatgatcatcgcgggctggcagaccaagtttgatcttccggacaagattgacaagaactcgggacaggagaagaaaacagccgtcacaccgcttgtgtaa

SEQ ID NO: 2188 - protein, 241 aa, Selaginella moellendorffii
MASQDVDLEVFGKAATGTGSPSNQRGDCPFSQRVYMVLEEKHLPYKATYVEEGPNKPDWFMQHNPSGLMPVLRDAADWIQDSDKIFEHVENKFKEPSLKTPDEFKSVGAGIFPAFTNWLKSKDRNAPAKQEFINELTALEEHLKKHGPYIAGKNPTDSDFALAPKLRHARVALKHFIDFVFPSNLQHVAKYIELMETRPSFKKTDSPDEMIIAGWQTKFDLPDKIDKNSGQEKKTAVTPLV

SEQ ID NO: 2189 - DNA, 657 bp, Selaginella moellendorffii
atggctgtggctaccactgaggctgtggaggttttggtgaaagccgcgaatggcgatccatcccggcttggcgattgtccattttctcagcgagtgctactcactctggaggagaaagggattccttataactccaaattcgtggatatggagaacaagcccgcatggtttttggaagcaaatccagaaggtaaagttccagtgatcaaggacgatggaaaatgggtcgcggattcggacgttatcacgcagctcatcgacacaaagttcccgtcaccttctctggttacaccacctgaaaagtcaagcgttggctcgaagatcttctcgtccttcgtgaaattcctcaagagcaaggatccgagcgatggctccgaggctgctctcctggaagagctaaaggcgctggatgagtatctcgccaagaatggaccattcgtgaatggatcaaacatctccgctgtggatctcagcctcgcccccaagctctaccacctcaaaatcgcgctgggccattacaagcagtggtcagtgccagaaaatctcacgaatctcaactcttacatggaggctctcttcaagcgagaaagcttccagaaaacgatggctcctgcggaggtagtcgtcaaaggatgggccaagcatttaagcgcgtga

SEQ ID NO: 2190 - protein, 218 aa, Selaginella moellendorffii
MAVATTEAVEVLVKAANGDPSRLGDCPFSQRVLLTLEEKGIPYNSKFVDMENKPAWFLEANPEGKVPVIKDDGKWVADSDVITQLIDTKFPSPSLVTPPEKSSVGSKIFSSFVKFLKSKDPSDGSEAALLEELKALDEYLAKNGPFVNGSNISAVDLSLAPKLYHLKIALGHYKQWSVPENLTNLNSYMEALFKRESFQKTMAPAEVVVKGWAKHLSA

SEQ ID NO: 2191 - DNA, 708 bp, Tortula ruralis
atggctgctccggtggaggttttcgtcaaggctgctatcggccatccagaccagctcggtgactgccctttctcacagagagtgctgctgactctggaggagaaggccatcgcatacaacgctacgttcattgacatcgagaacaagcctcaatggtttttggaggcgaatcctgaaggcaaggtgcccgtcatcaaggacggtgacaagtttgtggcggactcagatgtcatcacccagctgctggaggacaagtacccggagccttcgttgaagacacctccggagtattcatctgtaggtgcaaagctgttcccggcattcgtagcagtgttgaaaagccagtgctcctgcgacagcaccaaagcagctctgcttgcagagttcaaggctctcgacgaacacttcaaagtgcacaaacctttcattgctggcgagaaattaacaggtgttgatctggctctggcgcccaagctctatcacgcaacgatcgctgttccctactacagaaactggaccattcctcaagagctcaccagcctgttgagctacattcagaacataacttcacgagagtcgttcaagaagactgccgctttcaccgaattggtttttgccgggtgggacaaacacgatggaatctcacgttgtccggtggacacgtctgaagtgacgacagatttgttcccttatctgtccgttgcgtaa

SEQ ID NO: 2192 - protein, 235 aa, Tortula ruralis
MAAPVEVFVKAAIGHPDQLGDCPFSQRVLLTLEEKAIAYNATFIDIENKPQWFLEANPEGKVPVIKDGDKFVADSDVITQLLEDKYPEPSLKTPPEYSSVGAKLFPAFVAVLKSQCSCDSTKAALLAEFKALDEHFKVHKPFIAGEKLTGVDLALAPKLYHATIAVPYYRNWTIPQELTSLLSYIQNITSRESFKKTAAFTELVFAGWDKHDGISRCPVDTSEVTTDLFPYLSVA

SEQ ID NO: 2193 - DNA, 648 bp, Welwitschia mirabilis
atggccgctgcgctcgaagtttgtgtgaaggctgccgttggagctcccgataagcttggggactgtcctttttcgcaaagagtgttactgactcttgaggagaaacatgtgccctacagcaccaagctgatcgatgttagtaacaaaccggattggttcttgcaaataagtccagaaggcaaggttcctgttatcaaactcgacgataaatgggtaccggactctgatttcatcgcacagctattggaagagaagtaccccgaaccttcgttggcgaccccgccggagaaggctaccgtaggatcagcaatctttggaaagtttgtttcgtttttgacaagcaaggaccctagtgatggtacagagcaggccttgctgaacgagttacgtgctttggatgctcatttgaaggaaaatgggccatttgtcaatggggagaaaatctctgcagtggatctaagcttagcgcccaagctctatcatctgaaggttgccttgggtcactataaaaactggtctgttcccacggagttgacctatgtcaataaatacatggagacactcttttctcgcgagtcgtttctccataccaagcctgcagtggatgagtatatcatagcaggatgggcttcaaaggttaattcttaa

SEQ ID NO: 2194 - protein, 215 aa, Welwitschia mirabilis
MAAALEVCVKAAVGAPDKLGDCPFSQRVLLTLEEKHVPYSTKLIDVSNKPDWFLQISPEGKVPVIKLDDKWVPDSDFIAQLLEEKYPEPSLATPPEKATVGSAIFGKFVSFLTSKDPSDGTEQALLNELRALDAHLKENGPFVNGEKISAVDLSLAPKLYHLKVALGHYKNWSVPTELTYVNKYMETLFSRESFLHTKPAVDEYIIAGWASKVNS

SEQ ID NO: 2195 - protein, 29 aa, Artificial sequence
  motif 35
  VARIANT (2)..(2): / replace = "Asn"
  VARIANT (10)..(10): / replace = "Cys"
  VARIANT (21)..(21): / replace = "His"
  VARIANT (22)..(22): / replace = "Leu"
  VARIANT (25)..(25): / replace = "Asp"
  VARIANT (26)..(26): / replace = "Leu"
  VARIANT (27)..(27): / replace = "His"
  VARIANT (29)..(29): / replace = "Val"
PDKLGDCPFSQRVLLTLEEKKVPYKMKLI

SEQ ID NO: 2196 - protein, 29 aa, Artificial sequence
  motif 36
  VARIANT (2)..(2): / replace = "Glu" / replace = "Gly"
  VARIANT (5)..(5): / replace = "Ile"
  VARIANT (6)..(6): / replace = "Ala" / replace = "Ser"
  VARIANT (12)..(12): / replace = "Val"
  VARIANT (13)..(13): / replace = "Gly"
  VARIANT (14)..(14): / replace = "Leu"
  VARIANT (15)..(15): / replace = "Ile"
  VARIANT (19)..(19): / replace = "Phe"
  VARIANT (23)..(23): / replace = "Pro"
  VARIANT (25)..(25): / replace = "Ala"
DDKWVPDSDVITQILEEKYPEPSLVTPPE

SEQ ID NO: 2197 - protein, 35 aa, Artificial sequence
  motif 37
  VARIANT (2)..(2): / replace = "Tyr"
  VARIANT (3)..(3): / replace = "Val"
  VARIANT (4)..(4): / replace = "Ala"
  VARIANT (7)..(7): / replace = "Asn"
  VARIANT (8)..(8): / replace = "Val"
  VARIANT (9)..(9): / replace = "Thr"
  VARIANT (11)..(11): / replace = "Ala"
  VARIANT (16)..(16): / replace = "Gly"
  VARIANT (24)..(24): / replace = "Ile"
  VARIANT (29)..(29): / replace = "Tyr"
  VARIANT (31)..(31): / replace = "Asn"
  VARIANT (33)..(33): / replace = "Thr"
  VARIANT (34)..(34): / replace = "Ile"
PFINGEKISAVDLSLAPKLYHLEVALGHFKKWSVP

SEQ ID NO: 2198 - protein, 29 aa, Artificial sequence
  motif 38
  VARIANT (2)..(2): / replace = "Ile"
  VARIANT (7)..(7): / replace = "Ser"
  VARIANT (9)..(9): / replace = "Thr"
  VARIANT (12)..(12): / replace = "Asn"
  VARIANT (13)..(13): / replace = "Val"
  VARIANT (20)..(20): / replace = "Cys"
EVCVKAAVGAPDKLGDCPFSQRVLLTLEE

SEQ ID NO: 2199 - protein, 30 aa, Artificial sequence
  motif 39
  VARIANT (4)..(4): / replace = "Lys"
  VARIANT (13)..(13): / replace = "Ser"
  VARIANT (14)..(14): / replace = "Ser"
  VARIANT (16)..(16): / replace = "Ile"
  VARIANT (17)..(17): / replace = "Thr"
  VARIANT (24)..(24): / replace = "Ala"
  VARIANT (25)..(25): / replace = "Ser"
  VARIANT (28)..(28): / replace = "Ser"
PPEFASVGSKIFPTFVGFLKSKDPNDGTEQ

SEQ ID NO: 2200 - protein, 50 aa, Artificial sequence
  motif 40
  VARIANT (1)..(1): / replace = "Val"
  VARIANT (2)..(2): / replace = "Thr"
  VARIANT (4)..(4): / replace = "Ala"
  VARIANT (9)..(9): / replace = "Gly"
  VARIANT (16)..(16): / replace = "Gln"
  VARIANT (17)..(17): / replace = "Ile"
  VARIANT (22)..(22): / replace = "Tyr"
  VARIANT (24)..(24): / replace = "Asn"
  VARIANT (26)..(26): / replace = "Tyr"
  VARIANT (27)..(27): / replace = "Ile"
  VARIANT (29)..(29): / replace = "Asp"
  VARIANT (32)..(32): / replace = "Pro"
  VARIANT (35)..(35): / replace = "Lys"
  VARIANT (36)..(36): / replace = "Ser"
  VARIANT (38)..(38): / replace = "Thr"
  VARIANT (40)..(40): / replace = "Leu" / replace = "Ser"
  VARIANT (41)..(41): / replace = "Ile"
  VARIANT (44)..(44): / replace = "Leu"
  VARIANT (45)..(45): / replace = "Asp"
  VARIANT (48)..(48): / replace = "Val"
ISAVDLSLAPKLYHLEVALGHFKKWSVPESLTHVHNYMKALFSRESFEKT

SEQ ID NO: 2201 - protein, 29 aa, Artificial sequence
  motif 41
  VARIANT (2)..(2): / replace = "Val"
  VARIANT (8)..(8): / replace = "Thr"
  VARIANT (13)..(13): / replace = "Ile" / replace = "Thr"
  VARIANT (20)..(20): / replace = "Cys"
EICVKAAVGAPDVLGDCPFSQRVLLTLEE

SEQ ID NO: 2202 - protein, 30 aa, Artificial sequence
  motif 42
  VARIANT (4)..(4): / replace = "Tyr"
  VARIANT (13)..(13): / replace = "Gly"
  VARIANT (14)..(14): / replace = "Thr"
  VARIANT (17)..(17): / replace = "Lys"
  VARIANT (24)..(24): / replace = "Pro"
  VARIANT (25)..(25): / replace = "Ser"
  VARIANT (28)..(28): / replace = "Ser"
  VARIANT (30)..(30): / replace = "Lys"
PPEFASVGSKIFPSFVTFLKSKDANDGTEQ

SEQ ID NO: 2203 - protein, 50 aa, Artificial sequence
  motif 43
  VARIANT (1)..(1): / replace = "Val"
  VARIANT (2)..(2): / replace = "Ser"
  VARIANT (16)..(16): / replace = "Gln"
  VARIANT (20)..(20): / replace = "Glu"
  VARIANT (24)..(24): / replace = "Gly"
  VARIANT (26)..(26): / replace = "Ser" / replace = "Lys"
  VARIANT (27)..(27): / replace = "Ile"
  VARIANT (30)..(30): / replace = "Asn"
  VARIANT (36)..(36): / replace = "Ala"
  VARIANT (38)..(38): / replace = "Met"
  VARIANT (40)..(40): / replace = "Ala" / replace = "Ser"
ITAVDLSLAPKLYHLEVALGHFKKWTVPESLTHVHNYTKLLFSRESFEKT

SEQ ID NO: 2204 - protein, 50 aa, Artificial sequence
  motif 44
  VARIANT (4)..(4): / replace = "Ile"
  VARIANT (6)..(6): / replace = "Ala"
  VARIANT (10)..(10): / replace = "Leu" / replace = "Val"
  VARIANT (12)..(12): / replace = "Val"
  VARIANT (14)..(14): / replace = "Asp"
  VARIANT (15)..(15): / replace = "Arg"
  VARIANT (22)..(22): / replace = "Cys"
  VARIANT (37)..(37): / replace = "Glu"
  VARIANT (38)..(38): / replace = "Leu"
  VARIANT (44)..(44): / replace = "Gly"
  VARIANT (48)..(48): / replace = "Asp"
PLEVCVKASITTPNKLGDCPFTQRVLLTLEEKHLPYDMKLVDLSNKPEWF

SEQ ID NO: 2205 - protein, 50 aa, Artificial sequence
  motif 45
  VARIANT (2)..(2): / replace = "Ile"
  VARIANT (3)..(3): / replace = "Ala"
  VARIANT (11)..(11): / replace = "Ser" / replace = "Thr"
  VARIANT (16)..(16): / replace = "Phe"
  VARIANT (18)..(18): / replace = "Asp"
  VARIANT (20)..(20): / replace = "Ser"
  VARIANT (22)..(22): / replace = "Val"
  VARIANT (39)..(39): / replace = "Val"
  VARIANT (48)..(48): / replace = "Asn"
WVPDSDVITQALEEKYPEPPLATPPEKASVGSKIFSTFIGFLKSKDPSDG

SEQ ID NO: 2206 - protein, 50 aa, Artificial sequence
  motif 46
  VARIANT (5)..(5): / replace = "Asp"
  VARIANT (8)..(8): / replace = "Thr"
  VARIANT (9)..(9): / replace = "Ala"
  VARIANT (14)..(14): / replace = "Ile"
  VARIANT (24)..(24): / replace = "Glu"
  VARIANT (25)..(25): / replace = "Asp" / replace = "Glu"
  VARIANT (26)..(26): / replace = "Val"
  VARIANT (34)..(34): / replace = "Ala"
  VARIANT (40)..(40): / replace = "Met"
  VARIANT (47)..(47): / replace = "Phe"
  VARIANT (49)..(49): / replace = "Lys"
QALLNELSSFNDYLKENGPFINGKKISAADLSLGPKLYHLEIALGHYKNW

SEQ ID NO: 2207 - DNA, 2194 bp, Oryza sativa; identical to SEQ ID NO: 23

SEQ ID NO: 2208 - DNA, 56 bp, Artificial sequence
  primer: prm12191
ggggacaagtttgtacaaaaaagcaggcttaaacaatggttgttgaagtttgtgtc

SEQ ID NO: 2209 - DNA, 50 bp, Artificial sequence
  primer: prm12192
ggggaccactttgtacaagaaagctgggttcatacgttaaacctttggag

SEQ ID NO: 2210 - DNA, 402 bp, Oryza sativa; identical to SEQ ID NO: 971

SEQ ID NO: 2211 - protein, 133 aa, Oryza sativa; identical to SEQ ID NO: 972

SEQ ID NO: 2212 - DNA, 396 bp, Arabidopsis thaliana; identical to SEQ ID NO: 657

SEQ ID NO: 2213 - protein, 131 aa, Arabidopsis thaliana; identical to SEQ ID NO: 658

SEQ ID NO: 2214 - DNA, 360 bp, Arabidopsis thaliana; identical to SEQ ID NO: 619

SEQ ID NO: 2215 - protein, 119 aa, Arabidopsis thaliana; identical to SEQ ID NO: 620

SEQ ID NO: 2216 - DNA, 420 bp, Arabidopsis thaliana; identical to SEQ ID NO: 653

SEQ ID NO: 2217 - protein, 139 aa, Arabidopsis thaliana; identical to SEQ ID NO: 654

SEQ ID NO: 2218 - DNA, 384 bp, Arabidopsis thaliana; identical to SEQ ID NO: 617

SEQ ID NO: 2219 - protein, 127 aa, Arabidopsis thaliana; identical to SEQ ID NO: 618

SEQ ID NO: 2220 - DNA, 426 bp, Glycine max
atggccaaagttggaaaactaacaaagctcaagtcagcaatcaagagatggccctcattgaccaggctcagccgcaacagcagcagtgtctcttccaacaaaggggtctctggaaaaggaacatcccttaattcatccaaggaacacgagcatgaacaagaacaacttcgtgcggtttatgttggcaagtctaggaggcggtacctcgtgaactccgaagtgatcgatcaccccgtgtttcaggagctagtggacaggtcttgctcttctaattcttcttcttctcatcatcatgacgatgatggggtggtggtggtgtcgtgcgaggtggtgctgttcgagcacttgctgtggatgcttgagagcgaagagaccaagttggggtccatggatgagctggtcgagttctactcttgtgcatgctga

SEQ ID NO: 2221 - protein, 141 aa, Glycine max
MAKVGKLTKLKSAIKRWPSLTRLSRNSSSVSSNKGVSGKGTSLNSSKEHEHEQEQLRAVYVGKSRRRYLVNSEVIDHPVFQELVDRSCSSNSSSSHHHDDDGVVVVSCEVVLFEHLLWMLESEETKLGSMDELVEFYSCAC

SEQ ID NO: 2222 - DNA, 381 bp, Glycine max
atgaagaagctcaatctaatactcagtaagtgcaagaacttgtcaaagcatctaggaagatcttcatcatttaatagcctaaggtccaagtttgctaaggaagacttatgggaaggaaatggcatgcaagaaggtgaacattgtgaaactgtatttgttggcagcacaaggaaacggtacgtgataagctccaagtatttgaaccatcctctcctcaaagctctcatcaacaattccaagcaaaagggcagtgatgaaagtgttttggtggtcaactgtgaggtggttctctttgatcatctactgtggatgctagaaaatgcagatcctaagtttggttctgactctttggaggaattggctgaactctatgtgttttaa

SEQ ID NO: 2223 - protein, 126 aa, Glycine max
MKKLNLILSKCKNLSKHLGRSSSFNSLRSKFAKEDLWEGNGMQEGEHCETVFVGSTRKRYVISSKYLNHPLLKALINNSKQKGSDESVLVVNCEVVLFDHLLWMLENADPKFGSDSLEELAELYVF

SEQ ID NO: 2224 - DNA, 393 bp, Glycine max
atgaagaagatcaatctattactccgaaaatgcaagagtttgtcaaggcagctaggaagatcttcatcttatagcagcctgaggtcaaaatccacaaaagaagacatatgggggggtagacatggaatgcaagaagatgaaaattgtgaaactatatttgttggcagcacaaggaaacggtacataatcagcaaaaagtatctgaaccatcctcttctgaatgcactaatcaacaagtcaaagcaaattaagaaggacagtgatgaaagtagtgtgttggtggtcaactgtgaggtggttctctttgatcatctattgtggatgctagaaaatgcagatcccaagtttagttctgagtctttggaggaattggctgaactctatgtgttttga

SEQ ID NO: 2225 - protein, 130 aa, Glycine max
MKKINLLLRKCKSLSRQLGRSSSYSSLRSKSTKEDIWGGRHGMQEDENCETIFVGSTRKRYIISKKYLNHPLLNALINKSKQIKKDSDESSVLVVNCEVVLFDHLLWMLENADPKFSSESLEELAELYVF

SEQ ID NO: 2226 - DNA, 366 bp, Glycine max
atgtccaaagcaggaaaactaacgaagctcaagtcagtgctgaggaaatggaactcattcagcaacaaacacagtcaagtcagtgtcatctccgccgtcgcgaacgacggaggtgacacctcatcgctcctcccagtgtatgttgggaggacacgtcggcgttatctcgtgagcgccgatgtagtcggacacccgctcttcagggagctggtaggccggtcccgcgacggctccaaggaggaggacgaggacaccatcaacgtggcgtgcgaggttgtcctattcgagcacttgctctggatgctccacaatgccgatcctcaacccgagtcgctcgatgaactcgccgatttttacgcctgctag

SEQ ID NO: 2227 - protein, 121 aa, Glycine max
MSKAGKLTKLKSVLRKWNSFSNKHSQVSVISAVANDGGDTSSLLPVYVGRTRRRYLVSADVVGHPLFRELVGRSRDGSKEEDEDTINVACEVVLFEHLLWMLHNADPQPESLDELADFYAC

SEQ ID NO: 2228 - DNA, 384 bp, Glycine max
atggcaagaggtggaaaactaacgaagctaaagtcagtgctgaagaaatggaactcattcggcaacaacagcaagcatagccgccaccacagcatcagcgccgtcgcagacgacgaatcctcctccagatcagacctccacgccgtctacgtcggcaagtcccgccgcctctaccgcgtcgcctccgacgtcgtcgaccaccccgtcttccgggaactcgtcgagagatcccgcgactccgaccaacaacaacaaagcgaagacaccactatcaatgtcgtcgcatgtgaggttgtccttttcgaacacttgctctggatgctcgataacgccgacccacaacccgagtcactcaacgaactcgtcgacttctacgcttgctaa

SEQ ID NO: 2229 - protein, 127 aa, Glycine max
MARGGKLTKLKSVLKKWNSFGNNSKHSRHHSISAVADDESSSRSDLHAVYVGKSRRLYRVASDVVDHPVFRELVERSRDSDQQQQSEDTTINVVACEVVLFEHLLWMLDNADPQPESLNELVDFYAC

SEQ ID NO: 2230 - DNA, 423 bp, Glycine max
atggccaaagtgggaaagctaacaaagctcaagtcagccatcaagagattgccctcattgaccaagctcagccgcaacagcagcagtgtctcttccaacaaaagggtctctggaggaacatcctcttcatccaaggaacacgaacaagaacaacaacttcatgcggtttatgtcggcaagtctaggaggcggtacctcgtgaactccgaagtgatcgaccaccccgtgtttcaggaactagtggacaggtcttgctctacttcttctcatgatgatgaagatggggtggttgtggtgtcgtgcgaggtggtgctgttcgagcacttgctgtggatgcttgagagcgaagagacccagttggggtccatggatgagctggtcgagttctactcttggtgcatgctgacacaaacacccccctag

SEQ ID NO: 2231 - protein, 140 aa, Glycine max
MAKVGKLTKLKSAIKRLPSLTKLSRNSSSVSSNKRVSGGTSSSSKEHEQEQQLHAVYVGKSRRRYLVNSEVIDHPVFQELVDRSCSTSSHDDEDGVVVVSCEVVLFEHLLWMLESEETQLGSMDELVEFYSWCMLTQTPP

SEQ ID NO: 2232 - DNA, 384 bp, Glycine max
atggcaagaggtggaaaactaatgaagctaaaatcagtgctgaagaaatggaactcattcggcaatggcagcaagcatagccgccaccacagcagcagcgccgtcgccgatgacgagtcctcctccagatcagacctccacgccgtctacgtcggcaagtcccgccgcctctatcgcgtctcctccgacgttgtcgaccaccccgtcttccgggaactcgtcgagagatcccgcgattctgaccaacaacaaaacgaagacactactacgatcaatgtcgtcgcatgcgaggttgtccttttcgaacacttgctctggatgctcgataacgccgacccacaacccgagtcactcaacgaactcgtcgacttctacggttgctaa

SEQ ID NO: 2233 - protein, 127 aa, Glycine max
MARGGKLMKLKSVLKKWNSFGNGSKHSRHHSSSAVADDESSSRSDLHAVYVGKSRRLYRVSSDVVDHPVFRELVERSRDSDQQQNEDTTTINVVACEVVLFEHLLWMLDNADPQPESLNELVDFYGC

SEQ ID NO: 2234 - DNA, 369 bp, Medicago truncatula
atggcaaaaggtggaaagctaatgaagctaaaatcagcactcaaaaaatggaactcatttggaaacggaaaacagagccgtcacagcatcagcgccgtcgccgacgaagactcatcgtcttcaagatccgacctccacaccgtcttcgtaggaaagtctcgccgcctctaccgtgtcacctccgacgttgttgacaaccctgtcttccgtgaactcgttgaaaggtcccgtgaaacagaacaacaaaacgacactgtcaatgttgttgcttgtgaggttgtccttttcgaacatttgttatggatgcttgaaaatgctgatcctcaacctgaatctcttgatgaacttgtcgatttttacgcttgttag

SEQ ID NO: 2235 - protein, 122 aa, Medicago truncatula
MAKGGKLMKLKSALKKWNSFGNGKQSRHSISAVADEDSSSSRSDLHTVFVGKSRRLYRVTSDVVDNPVFRELVERSRETEQQNDTVNVVACEVVLFEHLLWMLENADPQPESLDELVDFYAC

SEQ ID NO: 2236 - DNA, 360 bp, Medicago truncatula
atggccaaacttggaaaattaacaaagcttaagtcagctatcaaaagatggccttcattaaccaaactcagccgcaacaatagctctatctcttcctcctccaagcaacaagaacaagagcttcatgctgtctatgtcggaaagtcgcggcgacaataccttgtgaactccaatgttgttcaacaccctgtgtttcaggagctagtggatagatcttcttgtgatgatggtgttgtggtggtttcttgtgaagttgttttgtttgaacatttgctgtggatgcttgaaagtgttgaaggtgagacacagttggggtccatggctgagctggttgagttctacaattgtggtgcatgttga

SEQ ID NO: 2237 - protein, 119 aa, Medicago truncatula
MAKLGKLTKLKSAIKRWPSLTKLSRNNSSISSSSKQQEQELHAVYVGKSRRQYLVNSNVVQHPVFQELVDRSSCDDGVVVVSCEVVLFEHLLWMLESVEGETQLGSMAELVEFYNCGAC

SEQ ID NO: 2238 - DNA, 366 bp, Medicago truncatula
atggccaaacttggaaaattaacaaagcttaagtcagctatcaaaagatggccttcattaaccaaactcagccgcaacaatagctctgtctcatcctcaaccaagcaacatgaacatgaacaagaacttcatgctgtctatgtcggaaagtcgcggcgacaatacctcgtgaactccgatgtcattcaacatcctgtgtttcaggagctggtggatagatcttcttgtgatgatggtgttgtggttgtttcttgtgaagttgttttgtttgaacatttgttgtggatgcttgagagtgttgaaggtgagacacaattggggtccatggctgagctggttgagttctacaattgtggtgcatgttga

SEQ ID NO: 2239 - protein, 121 aa, Medicago truncatula
MAKLGKLTKLKSAIKRWPSLTKLSRNNSSVSSSTKQHEHEQELHAVYVGKSRRQYLVNSDVIQHPVFQELVDRSSCDDGVVVVSCEVVLFEHLLWMLESVEGETQLGSMAELVEFYNCGAC

SEQ ID NO: 2240 - DNA, 369 bp, Medicago truncatula; identical to SEQ ID NO: 2234

SEQ ID NO: 2241 - protein, 122 aa, Medicago truncatula; identical to SEQ ID NO: 2235

SEQ ID NO: 2242 - DNA, 411 bp, Oryza sativa
atggggaagggaggcgggctgagcaagctgaggtgcatgatcaggaggtggcactcgtcgagccgcatcgcgcgggcgccgccgtcggcgggggagctggaggagggctctgcggcggcggcggcggcggcggggagggcggcatcgttccacggcgcggacgaggtgcccaaggggctccacccggtgtacgtcggcaagtcgcggcggcggtacctcatcgccgaggagctcgtcggccacccgctgttccagaacctcgtcgaccgcaccggcggcggcggaggcgccggcgccgcgaccgtcgtcggctgcgaggtcgtgctgttcgagcacctgctctggatgctggagaacgccgacccgcagccggagtccctcgacgagctcgtcgagtactacgcctgctga

SEQ ID NO: 2243 - protein, 136 aa, Oryza sativa
MGKGGGLSKLRCMIRRWHSSSRIARAPPSAGELEEGSAAAAAAAGRAASFHGADEVPKGLHPVYVGKSRRRYLIAEELVGHPLFQNLVDRTGGGGGAGAATVVGCEVVLFEHLLWMLENADPQPESLDELVEYYAC

SEQ ID NO: 2244 - DNA, 498 bp, Oryza sativa; identical to SEQ ID NO: 979

SEQ ID NO: 2245 - protein, 165 aa, Oryza sativa; identical to SEQ ID NO: 980

SEQ ID NO: 2246 - DNA, 459 bp, Oryza sativa
atggttcgtgtggaattcagtagttctagcggtcgcacaatgaggataggggtgtcagagaagatgcacaaggcattgcagaggctgcacttgcatggcgtcgccggcgggaattcgctctaccagaacatgctcagcgatgcggaggtcgatagcagaggtcgggtgcccgaagacgtgccggctgggtttttggttgtgtatgtgggcgatgagcggcgccggtttgtgatcagagccaagaccttgaaccacgctacgttccgcgtgctgctggagaagtcggccgcggagtttggttacaagcatgacggagggctgattattgcttgtgacgtggccttcttcgagcacctgctgtggctcattgagacaaacaatccttctcttttcagggaggaattgcggcattactgggctttttcgcctgattacaccacttgtcacatagtggattga

SEQ ID NO: 2247 - protein, 152 aa, Physcomitrella patens
MVRVEFSSSSGRTMRIGVSEKMHKALQRLHLHGVAGGNSLYQNMLSDAEVDSRGRVPEDVPAGFLVVYVGDERRRFVIRAKTLNHATFRVLLEKSAAEFGYKHDGGLIIACDVAFFEHLLWLIETNNPSLFREELRHYWAFSPDYTTCHIVD

SEQ ID NO: 2248 - DNA, 591 bp, Physcomitrella patens
atgtactttgggtgtgtccgaacaattgaagtggccctttatactcactctcaagtcgctcagctcaaggtcgcccacagcaccatcaccatgccgaacaaggtgcagaaggctttccagaagatccaaaagagcatctcaagttcaaatctgcaatatcagagcatccacccgaatgacgcgaaatctccttcgaaatcgggaagctcaggtaggaattcgactggcggctctgttaggaatggctgcgcctttggaaggtccggccgattagcagccggtgatctcagcgactctgacgacgacagcgacgattttgccccagatgacgtgcctgaggggtttcttgttgtgtatgtgggcgaagagcgccgtcggttcgtgataaaggcgaagtatttgagtcacccagtcttcaaggcactgctcaacaagtcggcagaggagtatgggtacgaacacaagggagggttggagattgcatgcgagacggtctttttcgaacatctgctggatctcattgagaccaacgatccttcactctccaacatggcgatagatgagcttgtgggctttgacgcctactcatag

SEQ ID NO: 2249 - protein, 196 aa, Physcomitrella patens
MYFGCVRTIEVALYTHSQVAQLKVAHSTITMPNKVQKAFQKIQKSISSSNLQYQSIHPNDAKSPSKSGSSGRNSTGGSVRNGCAFGRSGRLAAGDLSDSDDDSDDFAPDDVPEGFLVVYVGEERRRFVIKAKYLSHPVFKALLNKSAEEYGYEHKGGLEIACETVFFEHLLDLIETNDPSLSNMAIDELVGFDAYS

SEQ ID NO: 2250 - DNA, 507 bp, Physcomitrella patens
atgtcaaacagagtgtcttgcaagatgcagaaggccctccataagctccagaagagcatttcaagttccagtctgagttaccagagcatgcaccaccatagtgatgtcaaatctcctccgaagatgggaggttctctcaggaatggatgtgccttcggaaggtctggtcagttcgcagtcagtgatctcagtgatcgtgattctgacagcgaggactgggctcctgatgatgtgcctgaaggctatcttgtggtgtatgtgggcgaggggcggcgtcgatttgtcataaaagcgaagtatttgagtcacactgttttcaaagctttgctcaacaagtcggcggaggagttcgggtacgagcacaagagaggattggagattgcatgtgaagtggacttcttcgagcatctgttgtgcctcgtcgaaaccaacaatccttctttcttcagcacggagatcgatgagcttgttggcgtttacgcctactctcactgcatagatgcttaa

SEQ ID NO: 2251 - protein, 168 aa, Physcomitrella patens
MSNRVSCKMQKALHKLQKSISSSSLSYQSMHHHSDVKSPPKMGGSLRNGCAFGRSGQFAVSDLSDRDSDSEDWAPDDVPEGYLVVYVGEGRRRFVIKAKYLSHTVFKALLNKSAEEFGYEHKRGLEIACEVDFFEHLLCLVETNNPSFFSTEIDELVGVYAYSHCIDA

SEQ ID NO: 2252 - DNA, 459 bp, Physcomitrella patens
atggttcgtgtggaattcagtagttctagcggtcgcacaatgaggataggggtgtcagagaagatgcacaaggcattgcagaggctgcacttgcatggcgtcgccggcgggaattcactctaccagaacatgctcagcgatgcggaggtcgatagcagaggtcgggtgcccgaagacgtgccggctgggtttttggttgtgtatgtgggcgatgagcggcgccggtttgtgatcagagccaagaccttgaaccacgctacgttccgcgtgctgctggagaagtcggccgcggagtttggttacaagcatgacggagggctgattattgcttgtgacgtggccttcttcgagcacctgctgtggctcattgagacaaacaatccttctcttttcagggaggaattgcggcattactgggctttttcgcctgattacaccacttgtcacatagtggattga

SEQ ID NO: 2253 - protein, 152 aa, Physcomitrella patens; identical to SEQ ID NO: 2247

SEQ ID NO: 2254 - DNA, 408 bp, Populus trichocarpa
atggaaaagttttccaagttaacaaagctcaagtccgccataaagagattgccatctttcaccaagataggccgcacaaatagctccattgctgcttttaacaacgatcatgatcagtatgatcagtctgatgatcacgtcgatggcaagatttcaaatggacttcatgcagtttatgttggaaagtcaaggaggaggtatcttgtacgttccgatgtcatttgtcatcctcttttccaaggtttaatggacaggtcaggcgctggttctggtgatgaagaagataatcaagtagttgttgttgcttgtgaggttgttttgtttgagcacttgttgtggatgcttgagagtggtggctctcagttggggtccatggaggagcttgctgagttctattacacttgctga

SEQ ID NO: 2255 - protein, 135 aa, Populus trichocarpa
MEKFSKLTKLKSAIKRLPSFTKIGRTNSSIAAFNNDHDQYDQSDDHVDGKISNGLHAVYVGKSRRRYLVRSDVICHPLFQGLMDRSGAGSGDEEDNQVVVVACEVVLFEHLLWMLESGGSQLGSMEELAEFYYTC

SEQ ID NO: 2256 - DNA, 381 bp, Populus trichocarpa
atggccaaaggaggcaagctcatgaggctcaagtcggtcctcaagaaactcaactccttcaacaacaacaagcaaagccgccccagtaagattggaagctccatatctgtcaccaacgatgacatctcctcctcctactcctccggtgatctccaccccgtctacgtaggaaaatctcgtcgacgctatctcataagctccgatatcattgaccatccactgtttcgtgagcttgcagagaggtctagtactgagcaatcccctgatactattaatgttgcatgtgaggtggttttgttcgagcacttgctttggatgttggagaatgctgacccacagcctgagtctcttgacgagctcgttgaattctatgcttgttga

SEQ ID NO: 2257 - protein, 126 aa, Populus trichocarpa
MAKGGKLMRLKSVLKKLNSFNNNKQSRPSKIGSSISVTNDDISSSYSSGDLHPVYVGKSRRRYLISSDIIDHPLFRELAERSSTEQSPDTINVACEVVLFEHLLWMLENADPQPESLDELVEFYAC

SEQ ID NO: 2258 - DNA, 384 bp, Populus trichocarpa
atgaagaagatcagtttgatactacgtaaatgcaagagtctgtcaaggcaactagggagatcttcatcttacagtagcctaaggtccaaatctaccagagaagatttatggggtcatcatgatcataagcaagaagatgaaaaccatgcgactatatttgttggaagcacaaggaagaggtatgtcatcagctccaagtatttgagccatcctttagtgaatgctctcatcgagaagtcaaagcaaaagccgggagaggatagcattttggtggtgagatgcgaggttgtctttttcgaccaccttttatggatgcttgaaaatgcagatccaagtgttaattttggttctttggaagagctagctgatctctacatgttctag

SEQ ID NO: 2259 - protein, 127 aa, Populus trichocarpa
MKKISLILRKCKSLSRQLGRSSSYSSLRSKSTREDLWGHHDHKQEDENHATIFVGSTRKRYVISSKYLSHPLVNALIEKSKQKPGEDSILVVRCEVVFFDHLLWMLENADPSVNFGSLEELADLYMF

SEQ ID NO: 2260 - DNA, 381 bp, Populus trichocarpa
atggcaaagacttccaagttgacaaagctcaagtctgccataaagaggttgccatctttcaccaagatagtccgcacaaatagctccattgctgctgctgacaacgatcacatcgatggcaagatttcaaaggaacttcatgcagtctatgttggaaagtcaaggaggagatatctcttgagctccgatgtcatttgtcatcctctttttcaagggctaatagacaggtcaggcgctggttttggtgatgaggataatcaagcagttgttgttgcttgtgaggttgtcttgtttgagcacttgctgtggatgattgagagtggtggctctgatcagttggggtccatggaggagcttgctgaattctattacacttgctga

SEQ ID NO: 2261 - protein, 126 aa, Populus trichocarpa
MAKTSKLTKLKSAIKRLPSFTKIVRTNSSIAAADNDHIDGKISKELHAVYVGKSRRRYLLSSDVICHPLFQGLIDRSGAGFGDEDNQAVVVACEVVLFEHLLWMIESGGSDQLGSMEELAEFYYTC

SEQ ID NO: 2262 - DNA, 378 bp, Populus trichocarpa
atgaagaagatcaacttgatactaaggaaatgcaagagtttgtcaaggcaactagggagatcttcatcttatagtagcctaaggtctaagtcaaccagggaagatttatggggtgatcacaagcaagaaaatgaaaatcatgaaacaatatttgttggaagcacaagaaagaggtatgtcattagctccaagtatctgagccatcctctggtgaacgctctcattgagaagtcaaggcaaaaaccaggagaggataatattttggtggtgaaatgtgaggtggtcttttttgaccaccttttatggatgcttgaaaatgctgatccaaatgctagttttgattctttggaagaattagctgatctctacatgttctaa

SEQ ID NO: 2263 - protein, 125 aa, Populus trichocarpa
MKKINLILRKCKSLSRQLGRSSSYSSLRSKSTREDLWGDHKQENENHETIFVGSTRKRYVISSKYLSHPLVNALIEKSRQKPGEDNILVVKCEVVFFDHLLWMLENADPNASFDSLEELADLYMF

SEQ ID NO: 2264 - DNA, 390 bp, Solanum lycopersicum
  misc_feature (72)..(72): n is a, c, g, or t
  misc_feature (130)..(130): n is a, c, g, or t
  misc_feature (133)..(133): n is a, c, g, or t
  misc_feature (154)..(154): n is a, c, g, or t
  misc_feature (167)..(167): n is a, c, g, or t
  misc_feature (260)..(260): n is a, c, g, or t
  misc_feature (271)..(271): n is a, c, g, or t
  misc_feature (357)..(357): n is a, c, g, or t
atgactaaaggaggtaaactcacaaaaatcaaatcagtcttgaaaaaaatgcaatctttcaaacttggtcgngttaatagcattaacaacacagtcatgttggaaaacaatgcatataattcatacraanacnataacaacaacaacaacaacnatgataatttacncccagtctacgttggaaaatcgagacgtaggtacctagtaacgtccgatgttatcgatcaccctctttttcgagaacttatcgaaaggagganaggtgattcgnaaraatatgttagtgttggatgtgaagttgttttatttgaacatttgctatggatgcttcaaaatgctgatccacaacccgagtcnatggacgaacttgtcgagttttattcatgttga

SEQ ID NO: 2265 - protein, 129 aa, Solanum lycopersicum
  misc_feature (43)..(45): Xaa can be any naturally occurring amino acid
  misc_feature (52)..(52): Xaa can be any naturally occurring amino acid
  misc_feature (56)..(56): Xaa can be any naturally occurring amino acid
  misc_feature (87)..(87): Xaa can be any naturally occurring amino acid
  misc_feature (91)..(92): Xaa can be any naturally occurring amino acid
MTKGGKLTKIKSVLKKMQSFKLGRVNSINNTVMLENNAYNSYXXXNNNNNNXDNLXPVYVGKSRRRYLVTSDVIDHPLFRELIERRXGDSXXYVSVGCEVVLFEHLLWMLQNADPQPESMDELVEFYSC

SEQ ID NO: 2266 - DNA, 393 bp, Solanum lycopersicum
atggcgaaaggaggaaaactcacaaaactcaaatccgtgttgaagaaaatgcaatccttcaaaattggccgagtaaatagcaccgctggcgtagcagcaactcatcatcattcttcctccgaagaagacgattcattttccgatgaaaatcgctgctccggtaagaatttgttcccggtatacgtcggaaaatctcgccgccggtacctggtgagctccgacgtaatcgatcacccgctatttcgcgaactcgtggaaaggtccggtgagactgaagaatatattacagttggatgtgaagtcgtgctgtttgaacatttgttatggatgcttgaaaatgcagatcctcagccagagtcattagaggaattggttgaattttactcttgctga

SEQ ID NO: 2267 - protein, 130 aa, Solanum lycopersicum
MAKGGKLTKLKSVLKKMQSFKIGRVNSTAGVAATHHHSSSEEDDSFSDENRCSGKNLFPVYVGKSRRRYLVSSDVIDHPLFRELVERSGETEEYITVGCEVVLFEHLLWMLENADPQPESLEELVEFYSC

SEQ ID NO: 2268 - DNA, 711 bp, Oryza sativa
atggcgaagggcgggctgagcaagctcaagtgcatgatcaagaggtggcactcgtcgagcaggatctcccgcacgccgtcggggtgctcggcgtcggcggggtcgacgtcggcgcgcagctcgcacggcggcggacgcgtcggcggggaggaatgggggcgcagcgtcgtggcgaacggcggcggaaggggaagaggaggaggagggcgcggcgggtcggtgtcgttccacggcgcggacggcgtgcccccggggctccacccggtgtacgtcggcaagtcgcgccgccgctacctcatcgccgccgacctcgtcggccacccgatgttccagaacctcgtcgaccgctccggcggcggcggcgtggggggcggcggcggcggcggcaccgtcgtcggctgcgaggtcgtgctgttcgagcacctcctctggatgctggagaacgccgaccccgcagccggagtcggctcgagagctcgtcgagtactacgcgtgctgaccgggcctagctacctgcgatcgagaagacggcggcggccgccgatggccggcgtcgcccgagctcgccggagtcgtcggaggcttctagaagggggtaatttggtaattcggtttgttctttttttttttggttctttctttgaggttaggggtagagttgtaatatacgccgagctacgagggcgagtagcgaaatgtttggagatttag

SEQ ID NO: 2269 - protein, 236 aa, Oryza sativa
MAKGGLSKLKCMIKRWHSSSRISRTPSGCSASAGSTSARSSHGGGRVGGEEWGRSVVANGGGRGRGGGGRGGSVSFHGADGVPPGLHPVYVGKSRRRYLIAADLVGHPMFQNLVDRSGGGGVGGGGGGGTVVGCEVVLFEHLLWMLENADPAAGVGSRARRVLRVLTGPSYLRSRRRRRPPMAGVARARRSRRRLLEGGNLVIRFVLFFFGSFFEVRGRVVIYAELRGRVAKCLEI

SEQ ID NO: 2270 - DNA, 402 bp, Oryza sativa; identical to SEQ ID NO: 971

SEQ ID NO: 2271 - protein, 133 aa, Oryza sativa; identical to SEQ ID NO: 972

SEQ ID NO: 2272 - DNA, 402 bp, Oryza sativa; identical to SEQ ID NO: 971

SEQ ID NO: 2273 - protein, 133 aa, Oryza sativa; identical to SEQ ID NO: 972

SEQ ID NO: 2274 - DNA, 384 bp, Oryza sativa
atggcgaaaggaggaaacaaactgatgaagctgaaatcagttttgaagaaactcaattcattcaacaccaagcctaaccagccaccagctcaaaccaatcacagccgatcctccgccgtgagtgcgttcccctctgaagaccttcaaactgtctacgtaggccgaacacggaggacataccacgtgagctccgatgtcgtgagccacccgctcttccagcagctagcggcggtggatggtggatgcggcagcgaggacggttccatctctgtgtcgtgcgaagttgtcttgtttgagcatttgctttggatgttggagaacgccgacgccgatgagtcacgccccgagttggtctacgaacttgtcgagttctacgcttgttaa

SEQ ID NO: 2275 - protein, 127 aa, Oryza sativa
MAKGGNKLMKLKSVLKKLNSFNTKPNQPPAQTNHSRSSAVSAFPSEDLQTVYVGRTRRTYHVSSDVVSHPLFQQLAAVDGGCGSEDGSISVSCEVVLFEHLLWMLENADADESRPELVYELVEFYAC

SEQ ID NO: 2276 - DNA, 384 bp, Oryza sativa; identical to SEQ ID NO: 2274

SEQ ID NO: 2277 - protein, 127 aa, Oryza sativa; identical to SEQ ID NO: 2275

SEQ ID NO: 2278 - DNA, 471 bp, Zea mays
atggcgaagggcgggctgagcaagctcaagtgcatgctcaagaggtggcactcctcgagccggatctcgcgcacgccgtcagggtgctcggcgcgctcctcgcacgacgtcggcgacgctggcgccggcttcgctctggagaactcgtggaggaagggcgtggctgcctcgtccgtcttcgccttcggcggcggaggcacggggtcggcgtcgttccacggcgccgacggcgtgcccccgggcctccacccggtgtacgtcggcaagtcgcgccgccgctacctcatcgccgcggacctcgtcggccaccccctgttccagaacctcctcgaccgctctggcggcaccggcgccggcgggaccgtcgtcggctgcgaggtcgtgctgttcgagcacctcctctggatgctcgagaacgccgacccgcagccggagtcgctcgacgagctcgtcgagtattatgcgtgctga

SEQ ID NO: 2279 - protein, 156 aa, Zea mays
MAKGGLSKLKCMLKRWHSSSRISRTPSGCSARSSHDVGDAGAGFALENSWRKGVAASSVFAFGGGGTGSASFHGADGVPPGLHPVYVGKSRRRYLIAADLVGHPLFQNLLDRSGGTGAGGTVVGCEVVLFEHLLWMLENADPQPESLDELVEYYAC

SEQ ID NO: 2280 - DNA, 402 bp, Zea mays
gttcctctactctccccctacttaaaacatcagaactgaaggatgcatgatttacccccgcgcgcggcttggaggattcgggaggcttccaagtcggagcagtcagcactgactcagcaagcgtagtagtcgaccagctcgtcgagggactccggctgcgggtcggcgttctccagcatccagaggaggtgctcgaagaggacgacctcgcagccgacgacggtgcctgctgccgctcccccggtggtgccgccggtgcggtggacgagggtctggaatagcgggtggcccacgagctcctcggcgacgaggtaccggcggcgcgacttgccgacgtagaccgggtggaggcccttgggcacctcgtccgcgccgtggaacgaggcgcagtgcgcgtcgccg

SEQ ID NO: 2281 - protein, 133 aa, Zea mays
MAKGGLSKLRCMIKRWHSSSRIVSRAPSPSSAHDGATSGDAHCASFHGADEVPKGLHPVYVGKSRRRYLVAEELVGHPLFQTLVHRTGGTTGGAAAGTVVGCEVVLFEHLLWMLENADPQPESLDELVDYYAC

SEQ ID NO: 2282 - DNA, 417 bp, Zea mays
atggcgaagggcgggctgggcaagctgcggtgcatgataaggaggtggcactcgtcgagccgcatcgcgcgcgcgccgccggcggccagccacggcgacgacgacgacggcgccgccgacgcgcgccgcggcggcggtggtggggcgtcgtcgttccacggcgcggacgaggtgcccaagggcctgcacccggtgtacgtgggcaagtcgcggcgccggtacctgatcgccgaggagctcgtgggccacccgctgttccggaccctcgtggaccgcagcggcggaggagcggcggcgggcaccgtggtggtcggctgcgaggtcgtgctgttcgagcacctgctgtggatgctggagaacgcggacccgcagccggagtccctcgacgagctcgtcgactactacgcgtgctgctga

SEQ ID NO: 2283 - protein, 138 aa, Zea mays
MAKGGLGKLRCMIRRWHSSSRIARAPPAASHGDDDDGAADARRGGGGGASSFHGADEVPKGLHPVYVGKSRRRYLIAEELVGHPLFRTLVDRSGGGAAAGTVVVGCEVVLFEHLLWMLENADPQPESLDELVDYYACC

SEQ ID NO: 2284 - protein, 19 aa, Artificial sequence
  motif 47
CEVVLFEHLLWMLENADPQ

SEQ ID NO: 2285 - protein, 13 aa, Artificial sequence
  motif 48
PESLDELVEYYAC

SEQ ID NO: 2286 - protein, 18 aa, Artificial sequence
  motif 49
GLSKLRCMIRRWHSSSRI

SEQ ID NO: 2287 - protein, 43 aa, Artificial sequence
  motif 50
SFHGADEVPKGLHPVYVGKSRRRYLIAEELVGHPLFQNLVDRT

SEQ ID NO: 2288 - DNA, 2194 bp, Oryza sativa; identical to SEQ ID NO: 23
